United States Patent Application Publication US 2026/0294834 A1, published October 1, 2026 (application 19/479,968).

The application's sequence listing, which the Patent Office published only in electronic form, follows.

SEQUENCE LISTING (4036 sequences)

SEQ ID NO: 1 - protein, 312 aa, synthetic construct
MRMLLALLALSAARPSASAESHWCYEVQAESSNYPCLVPVKWGGNCQKDRQSPINIVTTKAKVDKKLGRFFFSGYDKKQTWTVQNNGHSVMMLLENKASISGGGLPAPYQAKQLHLHWSDLPYKGSEHSLDGEHFAMEMHIVHEKEKGTSRNVKEAQDPEDEIAVLAFLVEAGTQVNEGFQPLVEALSNIPKPEMSTTMAESSLLDLLPKEEKLRHYFRYLGSLTTPTCDEKVVWTVFREPIQLHREQILAFSQKLYYDKEQTVSMKDNVRPLQQLGQRTVIKSGAPGRPLPWALPALLGPMLACLLAGFLR

SEQ ID NO: 2 - protein, 297 aa, synthetic construct
MRMLLALLALSAARPSASAESHWCYEVQAESSNYPCLVPVKWGGNCQKDRQSPINIVTTKAKVDKKLGRFFFSGYDKKQTWTVQNNGHSVMMLLENKASISGGGLPAPYQAKQLHLHWSDLPYKGSEHSLDGEHFAMEMHIVHEKEKGTSRNVKEAQDPEDEIAVLAFLVEAGTQVNEGFQPLVEALSNIPKPEMSTTMAESSLLDLLPKEEKLRHYFRYLGSLTTPTCDEKVVWTVFREPIQLHREQILAFSQKLYYDKEQTVSMKDNVRPLQQLGQRTVIKSGGSGYPYDVPDYA

SEQ ID NO: 3 - protein, 315 aa, synthetic construct
MRMLLALLALLALSAARPSAAAESHWCYESQANSSKDTCLVPGKWGGNCQKDRQSPINIVTRKAKMDKKLGRFSFSGYDKKQTWTVQNNGHSVMMLLGNKASISGGGLPARYQATQLHLHWSNFLDKGSEHSLDGEHFAMEVHIVHEKEKGTSRNVKEAQDPEDEIAVLAFLVEAGPQENKGFRPLVEALSNIPKPEMNTTMAESSLLDLLPKEEKLRNYFRYLGSLTTPTCDEKVVWTVFQEPIQLHREQILAFSQKLYYDKDQKLNMTNNIRPLQRPGQRVVLRSGAPGQLLPWVLPALLGPTLARLLASFLR

SEQ ID NO: 4 - protein, 300 aa, synthetic construct
MRMLLALLALLALSAARPSAAAESHWCYESQANSSKDTCLVPGKWGGNCQKDRQSPINIVTRKAKMDKKLGRFSFSGYDKKQTWTVQNNGHSVMMLLGNKASISGGGLPARYQATQLHLHWSNFLDKGSEHSLDGEHFAMEVHIVHEKEKGTSRNVKEAQDPEDEIAVLAFLVEAGPQENKGFRPLVEALSNIPKPEMNTTMAESSLLDLLPKEEKLRNYFRYLGSLTTPTCDEKVVWTVFQEPIQLHREQILAFSQKLYYDKDQKLNMTNNIRPLQRPGQRVVLRSGGSGYPYDVPDYA

SEQ ID NO: 5 - protein, 722 aa, synthetic construct
MAADGYLPDWLEDNLSEGIREWWALKPGAPQPKANQQHQDNARGLVLPGYKYLGPGNGLDKGEPVNAADAAALEHDKAYDQQLKAGDNPYLKYNBADAEFQERLKEDTSFGGNLGRAVFQAKKRLLEPLGLVEEAAKTAPGKKRPVEQSPQEPDSSAGIGKSGAQPAKKRLNFGQTGDTESVPDPQPIGEPPAAPSGVGSLTMASGGGAPVADNNEGADGVGSSSCDSQWLGDRVITTSTRTWALPTYNNHLYKQISNSTSGGSSNDNAYFGYSTPWGYFDCHFSPRDWQRLINNNWGFRPKRLNFKLFNIQVKEVTDNNGVKTIANNLTSTVQVFTDSDYQLPYVLGSAHEGCLPPFPADVFMIPQYGYLTLNDGSQAVGRSSFYCLEFPSQMLRTGNNFQFSYEFENVPFHSSYAHSQSLDRLMNPLIDQYLYYLSKTINGSNQQTLKFSVAGPSNMAVQGRNYIPGPSYRQQRVSTTVTQNNNSEFAWPGASSWALNGRNSLMNPGPAMASHKEGEDRFFPLSGSLIFGKQGTGRDNVDADKVMITNEEEIKTTNPVATESYGQVATNHQSAQAQAQTGWVQNQGILPGMVWQDRDVYLQGPIWAKIPHTDNFHPSPLMGGFGMKHPPPQILIKNTPVPADPPTAFNKDKLNSFITQYSTGQVSVEIEWELQKENSKRWNPEIQYTSNYYKSNNVEFAVNTEGVYSEPRPIGTRYLTRN

SEQ ID NO: 6 - protein, 743 aa, synthetic construct
MAADGYLPDWLEDNLSEGIREWWALKPGAPQPKANQQHQDNARGLVLPGYKYLGPGNGLDKGEPVNAADAAALEHDKAYDQQLKAGDNPYLKYNBADAEFQERLKEDTSFGGNLGRAVFQAKKRLLEPLGLVEEAAKTAPGKKRPVEQSPQEPDSSAGIGKSGAQPAKKRLNFGQTGDTESVPDPQPIGEPPAAPSGVGSLTMASGGGAPVADNNEGADGVGSSSGNWHCDSQWLGDRVITTSTRTWALPTYNNHLYKQISNSTSGGSSNDNAYFGYSTPWGYFDFNRFHCHFSPRDWQRLINNNWGFRPKRLNFKLFNIQVKEVTDNNGVKTIANNLTSTVQVFTDSDYQLPYVLGSAHEGCLPPFPADVFMIPQYGYLTLNDGSQAVGRSSFYCLEYFPSQMLRTGNNFQFSYEFENVPFHSSYAHSQSLDRLMNPLIDQYLYYLSKTINGSGQNQQTLKFSVAGPSNMAVQGRNYIPGPSYRQQRVSTTVTQNNNSEFAWPGASSWALNGRNSLMNPGPAMASHKEGEDRFFPLSGSLIFGKQGTGRDNVDADKVMITNEEEIKTTNPVATESYGQVATNHQSXXXXXXXXXAQAQTGWVQNQGILPGMVWQDRDVYLQGPIWAKIPHTDGNFHPSPLMGGFGMKHPPPQILIKNTPVPADPPTAFNKDKLNSFITQYSTGQVSVEIEWELQKENSKRWNPEIQYTSNYYKSNNVEFAVNTEGVYSEPRPIGTRYLTRNL

SEQ ID NO: 7 - protein, 9 aa, synthetic construct
DGVVHETVR

SEQ ID NO: 8 - protein, 9 aa, synthetic construct
DGVVGVNIR

SEQ ID NO: 9 - protein, 9 aa, synthetic construct
DGEVGLTVR

SEQ ID NO: 10 - protein, 9 aa, synthetic construct
DGIVGSTIR

SEQ ID NO: 11 - protein, 9 aa, synthetic construct
AQTISTGIY

SEQ ID NO: 12 - protein, 9 aa, synthetic construct
AQKWDNQQS

SEQ ID NO: 13 - protein, 9 aa, synthetic construct
DGIFGGGGK

SEQ ID NO: 14 - protein, 9 aa, synthetic construct
AQTKSNGIS

SEQ ID NO: 15 - protein, 9 aa, synthetic construct
AQTVRTGIS

SEQ ID NO: 16 - protein, 9 aa, synthetic construct
AQTAMEFDH

SEQ ID NO: 17 - protein, 9 aa, synthetic construct
AQVPEQHIK

SEQ ID NO: 18 - protein, 8 aa, synthetic construct
AQWESHIR

SEQ ID NO: 19 - protein, 9 aa, synthetic construct
AQTYPNYNS

SEQ ID NO: 20 - protein, 9 aa, synthetic construct
DGIVHLAVR

SEQ ID NO: 21 - protein, 9 aa, synthetic construct
DGLLEYTFR

SEQ ID NO: 22 - protein, 9 aa, synthetic construct
AQIGDYFGV

SEQ ID NO: 23 - protein, 9 aa, synthetic construct
AQVDVWGRA

SEQ ID NO: 24 - protein, 9 aa, synthetic construct
AQMDGWGRT

SEQ ID NO: 25 - protein, 9 aa, synthetic construct
AQTRFIEPY

SEQ ID NO: 26 - protein, 9 aa, synthetic construct
AQTSTLVFH

SEQ ID NO: 27 - protein, 9 aa, synthetic construct
AQFVMYAYD

SEQ ID NO: 28 - protein, 9 aa, synthetic construct
AQKFREGDI

SEQ ID NO: 29 - protein, 12 aa, synthetic construct
AQKWDLTDRAAV

SEQ ID NO: 30 - protein, 9 aa, synthetic construct
AQTYNENSL

SEQ ID NO: 31 - protein, 9 aa, synthetic construct
AQKNLRWGH

SEQ ID NO: 32 - protein, 9 aa, synthetic construct
AQLRKANRP

SEQ ID NO: 33 - protein, 9 aa, synthetic construct
AQGTYCAGQ

SEQ ID NO: 34 - protein, 9 aa, synthetic construct
AQSAIRMKC

SEQ ID NO: 35 - protein, 9 aa, synthetic construct
AQIRWVRGV

SEQ ID NO: 36 - protein, 9 aa, synthetic construct
AQAVMKRIK

SEQ ID NO: 37 - protein, 9 aa, synthetic construct
AQIIIKMLR

SEQ ID NO: 38 - protein, 9 aa, synthetic construct
AQHRTCVAF

SEQ ID NO: 39 - protein, 9 aa, synthetic construct
AQSGGCAGC

SEQ ID NO: 40 - protein, 9 aa, synthetic construct
AQSFVRFSW

SEQ ID NO: 41 - protein, 9 aa, synthetic construct
AQSVHFRCG

SEQ ID NO: 42 - protein, 9 aa, synthetic construct
AQIMSCTMF

SEQ ID NO: 43 - protein, 9 aa, synthetic construct
AQDKAYTNS

SEQ ID NO: 44 - protein, 9 aa, synthetic construct
AQVQRANPI

SEQ ID NO: 45 - protein, 9 aa, synthetic construct
AQENPSRGT

SEQ ID NO: 46 - protein, 9 aa, synthetic construct
AQSTRLNSV

SEQ ID NO: 47 - protein, 9 aa, synthetic construct
AQYGAGSAM

SEQ ID NO: 48 - protein, 9 aa, synthetic construct
AQRVDPSGL

SEQ ID NO: 49 - protein, 9 aa, synthetic construct
AQARLPSSP

SEQ ID NO: 50 - protein, 9 aa, synthetic construct
AQTNIPPRT

SEQ ID NO: 51 - protein, 9 aa, synthetic construct
AQTRNLDVA

SEQ ID NO: 52 - protein, 9 aa, synthetic construct
AQLSPHAGA

SEQ ID NO: 53 - protein, 9 aa, synthetic construct
AQLSNLTTN

SEQ ID NO: 54 - protein, 9 aa, synthetic construct
AQADPARYM

SEQ ID NO: 55 - protein, 9 aa, synthetic construct
AQSSSATRS

SEQ ID NO: 56 - protein, 9 aa, synthetic construct
AQNASTVSR

SEQ ID NO: 57 - protein, 9 aa, synthetic construct
AQTAPLRGL

SEQ ID NO: 58 - protein, 9 aa, synthetic construct
AQNSSGDRS

SEQ ID NO: 59 - protein, 9 aa, synthetic construct
AQTSHNANR

SEQ ID NO: 60 - protein, 9 aa, synthetic construct
AQSTNANPG

SEQ ID NO: 61 - protein, 9 aa, synthetic construct
AQNTSTLRP

SEQ ID NO: 62 - protein, 9 aa, synthetic construct
AQVLSLSNP

SEQ ID NO: 63 - protein, 9 aa, synthetic construct
AQVAPFSSG

SEQ ID NO: 64 - protein, 9 aa, synthetic construct
AQLMKPSSV

SEQ ID NO: 65 - protein, 9 aa, synthetic construct
AQGVIRVDS

SEQ ID NO: 66 - protein, 9 aa, synthetic construct
AQTTSSTSY

SEQ ID NO: 67 - protein, 9 aa, synthetic construct
AQVQRGTLT

SEQ ID NO: 68 - protein, 9 aa, synthetic construct
AQNALVNQF

SEQ ID NO: 69 - protein, 9 aa, synthetic construct
AQPTTVTPR

SEQ ID NO: 70 - protein, 9 aa, synthetic construct
AQGLPWTSE

SEQ ID NO: 71 - protein, 9 aa, synthetic construct
AQPPIANPY

SEQ ID NO: 72 - protein, 9 aa, synthetic construct
AQTTRELLK

SEQ ID NO: 73 - protein, 9 aa, synthetic construct
AQRYPGEGP

SEQ ID NO: 74 - protein, 9 aa, synthetic construct
AQLATATHS

SEQ ID NO: 75 - protein, 9 aa, synthetic construct
AQRVPSNEL

SEQ ID NO: 76 - protein, 9 aa, synthetic construct
AQLTGHHNP

SEQ ID NO: 77 - protein, 9 aa, synthetic construct
AQSHPLKVP

SEQ ID NO: 78 - protein, 9 aa, synthetic construct
AQTDFKHMV

SEQ ID NO: 79 - protein, 9 aa, synthetic construct
AQWMALTAA

SEQ ID NO: 80 - protein, 9 aa, synthetic construct
AQVNKTISM

SEQ ID NO: 81 - protein, 9 aa, synthetic construct
AQSIRPVPT

SEQ ID NO: 82 - protein, 9 aa, synthetic construct
AQKTNASLL

SEQ ID NO: 83 - protein, 9 aa, synthetic construct
AQGSPGPAM

SEQ ID NO: 84 - protein, 9 aa, synthetic construct
AQFNKLPSS

SEQ ID NO: 85 - protein, 9 aa, synthetic construct
AQGSLRRGM

SEQ ID NO: 86 - protein, 9 aa, synthetic construct
AQRLRDLPN

SEQ ID NO: 87 - protein, 9 aa, synthetic construct
AQSGPKAPG

SEQ ID NO: 88 - protein, 9 aa, synthetic construct
AQALIGSTA

SEQ ID NO: 89 - protein, 9 aa, synthetic construct
AQGRTTTGT

SEQ ID NO: 90 - protein, 9 aa, synthetic construct
AQKLESIMG

SEQ ID NO: 91 - protein, 9 aa, synthetic construct
AQSTINSPS

SEQ ID NO: 92 - protein, 9 aa, synthetic construct
AQSFAAAQP

SEQ ID NO: 93 - protein, 9 aa, synthetic construct
AQIPRPNVA

SEQ ID NO: 94 - protein, 9 aa, synthetic construct
AQYQNGPIQ

SEQ ID NO: 95 - protein, 9 aa, synthetic construct
AQARIVSGA

SEQ ID NO: 96 - protein, 9 aa, synthetic construct
AQSKVISPP

SEQ ID NO: 97 - protein, 9 aa, synthetic construct
AQQAGLMAA

SEQ ID NO: 98 - protein, 9 aa, synthetic construct
AQSSPPGKD

SEQ ID NO: 99 - protein, 9 aa, synthetic construct
AQTMSMPKV

SEQ ID NO: 100 - protein, 9 aa, synthetic construct
AQTVAPPRH

SEQ ID NO: 101 - protein, 9 aa, synthetic construct
AQRTNDKVM

SEQ ID NO: 102 - protein, 9 aa, synthetic construct
AQVVRPYTV

SEQ ID NO: 103 - protein, 9 aa, synthetic construct
AQTLGHSTM

SEQ ID NO: 104 - protein, 9 aa, synthetic construct
AQMPQYQPG

SEQ ID NO: 105 - protein, 9 aa, synthetic construct
AQSPPSHKH

SEQ ID NO: 106 - protein, 9 aa, synthetic construct
AQAGKAFEF

SEQ ID NO: 107 - protein, 9 aa, synthetic construct
AQDLRGLSH

SEQ ID NO: 108 - protein, 9 aa, synthetic construct
AQAPSYTTL

SEQ ID NO: 109 - protein, 9 aa, synthetic construct
AQSQSHTNT

SEQ ID NO: 110 - protein, 9 aa, synthetic construct
AQVFSNSVP

SEQ ID NO: 111 - protein, 9 aa, synthetic construct
AQLQRSGVH

SEQ ID NO: 112 - protein, 9 aa, synthetic construct
AQAKSAQTT

SEQ ID NO: 113 - protein, 9 aa, synthetic construct
AQLSTVRDL

SEQ ID NO: 114 - protein, 9 aa, synthetic construct
AQRFEVGSQ

SEQ ID NO: 115 - protein, 9 aa, synthetic construct
AQLLADTRP

SEQ ID NO: 116 - protein, 9 aa, synthetic construct
AQDLHTRGG

SEQ ID NO: 117 - protein, 9 aa, synthetic construct
AQPPTHRTA

SEQ ID NO: 118 - protein, 9 aa, synthetic construct
AQRETPGVN

SEQ ID NO: 119 - protein, 9 aa, synthetic construct
AQHLPVSQA

SEQ ID NO: 120 - protein, 9 aa, synthetic construct
AQLKLGSLS

SEQ ID NO: 121 - protein, 9 aa, synthetic construct
AQHNGWTAD

SEQ ID NO: 122 - protein, 9 aa, synthetic construct
AQGQSVVNT

SEQ ID NO: 123 - protein, 9 aa, synthetic construct
AQVNDVSHR

SEQ ID NO: 124 - protein, 9 aa, synthetic construct
AQEHTSELS

SEQ ID NO: 125 - protein, 9 aa, synthetic construct
AQAAVVHRG

SEQ ID NO: 126 - protein, 9 aa, synthetic construct
AQKIAGTAD

SEQ ID NO: 127 - protein, 9 aa, synthetic construct
AQGALRESM

SEQ ID NO: 128 - protein, 9 aa, synthetic construct
AQRPPELNR

SEQ ID NO: 129 - protein, 9 aa, synthetic construct
AQSVVTHLA

SEQ ID NO: 130 - protein, 9 aa, synthetic construct
AQSAKPGVF

SEQ ID NO: 131 - protein, 9 aa, synthetic construct
AQPLRLSTE

SEQ ID NO: 132 - protein, 9 aa, synthetic construct
AQPHVPGAG

SEQ ID NO: 133 - protein, 9 aa, synthetic construct
AQSSSVPMG

SEQ ID NO: 134 - protein, 9 aa, synthetic construct
AQTAQMSAP

SEQ ID NO: 135 - protein, 9 aa, synthetic construct
AQTRGDPTS

SEQ ID NO: 136 - protein, 9 aa, synthetic construct
AQMPRITTS

SEQ ID NO: 137 - protein, 9 aa, synthetic construct
AQIELRGNH

SEQ ID NO: 138 - protein, 9 aa, synthetic construct
AQEYGIDRL

SEQ ID NO: 139 - protein, 9 aa, synthetic construct
AQLAAPVKT

SEQ ID NO: 140 - protein, 9 aa, synthetic construct
AQSRPQIGS

SEQ ID NO: 141 - protein, 9 aa, synthetic construct
AQNMSLSNY

SEQ ID NO: 142 - protein, 9 aa, synthetic construct
AQIPHREPT

SEQ ID NO: 143 - protein, 9 aa, synthetic construct
AQISSVRVS

SEQ ID NO: 144 - protein, 9 aa, synthetic construct
AQLEYKHAL

SEQ ID NO: 145 - protein, 9 aa, synthetic construct
AQYMKAVAT

SEQ ID NO: 146 - protein, 9 aa, synthetic construct
AQLPPNHRG

SEQ ID NO: 147 - protein, 9 aa, synthetic construct
AQHTNNSYA

SEQ ID NO: 148 - protein, 9 aa, synthetic construct
AQSYIKTSA

SEQ ID NO: 149 - protein, 9 aa, synthetic construct
AQVGKNEIY

SEQ ID NO: 150 - protein, 9 aa, synthetic construct
AQRVSNDLM

SEQ ID NO: 151 - protein, 9 aa, synthetic construct
AQRDHRNTD

SEQ ID NO: 152 - protein, 9 aa, synthetic construct
AQHPEIRLT

SEQ ID NO: 153 - protein, 9 aa, synthetic construct
AQYGVLNHS

SEQ ID NO: 154 - protein, 9 aa, synthetic construct
AQNTPSSHA

SEQ ID NO: 155 - protein, 9 aa, synthetic construct
AQLYESYKP

SEQ ID NO: 156 - protein, 9 aa, synthetic construct
AQNVAGSVF

SEQ ID NO: 157 - protein, 9 aa, synthetic construct
AQAAQRTAL

SEQ ID NO: 158 - protein, 9 aa, synthetic construct
AQHNHFETV

SEQ ID NO: 159 - protein, 9 aa, synthetic construct
AQHVAKHEP

SEQ ID NO: 160 - protein, 9 aa, synthetic construct
AQGKSANLS

SEQ ID NO: 161 - protein, 9 aa, synthetic construct
AQATSREAM

SEQ ID NO: 162 - protein, 9 aa, synthetic construct
AQVPVHLPT

SEQ ID NO: 163 - protein, 9 aa, synthetic construct
AQFGQVTTN

SEQ ID NO: 164 - protein, 9 aa, synthetic construct
AQHPSGYPT

SEQ ID NO: 165 - protein, 9 aa, synthetic construct
AQSFTLPNS

SEQ ID NO: 166 - protein, 9 aa, synthetic construct
AQNDVTFAG

SEQ ID NO: 167 - protein, 9 aa, synthetic construct
AQELHKSLP

SEQ ID NO: 168 - protein, 9 aa, synthetic construct
AQDGSNILL

SEQ ID NO: 169 - protein, 9 aa, synthetic construct
AQLQGNPAA

SEQ ID NO: 170 - protein, 9 aa, synthetic construct
AQKGVTDNT

SEQ ID NO: 171 - protein, 9 aa, synthetic construct
AQVVRTVAD

SEQ ID NO: 172 - protein, 9 aa, synthetic construct
AQGFKTKEI

SEQ ID NO: 173 - protein, 9 aa, synthetic construct
AQKIPTWDD

SEQ ID NO: 174 - protein, 9 aa, synthetic construct
AQFTSLVTP

SEQ ID NO: 175 - protein, 9 aa, synthetic construct
AQPPKYGTH

SEQ ID NO: 176 - protein, 9 aa, synthetic construct
AQTVKRVEL

SEQ ID NO: 177 - protein, 9 aa, synthetic construct
AQGARMVRE

SEQ ID NO: 178 - protein, 9 aa, synthetic construct
AQPLARDVT

SEQ ID NO: 179 - protein, 9 aa, synthetic construct
AQFLSGTSN

SEQ ID NO: 180 - protein, 9 aa, synthetic construct
AQVNLTLPP

SEQ ID NO: 181 - protein, 9 aa, synthetic construct
AQTTPLPAV

SEQ ID NO: 182 - protein, 9 aa, synthetic construct
AQLGVKILL

SEQ ID NO: 183 - protein, 9 aa, synthetic construct
AQGRVNNGG

SEQ ID NO: 184 - protein, 9 aa, synthetic construct
AQVGLGPTN

SEQ ID NO: 185 - protein, 9 aa, synthetic construct
AQNTQAYGA

SEQ ID NO: 186 - protein, 9 aa, synthetic construct
AQEHTSNSS

SEQ ID NO: 187 - protein, 9 aa, synthetic construct
AQGSKFEIS

SEQ ID NO: 188 - protein, 9 aa, synthetic construct
AQTLRELGT

SEQ ID NO: 189 - protein, 9 aa, synthetic construct
AQPIRASMV

SEQ ID NO: 190 - protein, 9 aa, synthetic construct
AQRGSSGVS

SEQ ID NO: 191 - protein, 9 aa, synthetic construct
AQDRHMSMA

SEQ ID NO: 192 - protein, 9 aa, synthetic construct
AQVRISGVG

SEQ ID NO: 193 - protein, 9 aa, synthetic construct
AQTRQASLS

SEQ ID NO: 194 - protein, 9 aa, synthetic construct
AQSCTSWVQ

SEQ ID NO: 195 - protein, 9 aa, synthetic construct
AQPQTSAYL

SEQ ID NO: 196 - protein, 9 aa, synthetic construct
AQNHLIQKA

SEQ ID NO: 197 - protein, 9 aa, synthetic construct
AQLPQRIAT

SEQ ID NO: 198 - protein, 9 aa, synthetic construct
AQVAPGNSA

SEQ ID NO: 199 - protein, 9 aa, synthetic construct
AQPNVMQMP

SEQ ID NO: 200 - protein, 9 aa, synthetic construct
AQFSRELPD

SEQ ID NO: 201 - protein, 9 aa, synthetic construct
AQLGSKPRR

SEQ ID NO: 202 - protein, 9 aa, synthetic construct
AQNRASNTL

SEQ ID NO: 203 - protein, 9 aa, synthetic construct
AQVPPVGRL

SEQ ID NO: 204 - protein, 9 aa, synthetic construct
AQSQYSTGV

SEQ ID NO: 205 - protein, 9 aa, synthetic construct
AQGFPPVAP

SEQ ID NO: 206 - protein, 9 aa, synthetic construct
AQTHASTAE

SEQ ID NO: 207 - protein, 9 aa, synthetic construct
AQSPNTRDP

SEQ ID NO: 208 - protein, 9 aa, synthetic construct
AQVSRAPLP

SEQ ID NO: 209 - protein, 9 aa, synthetic construct
AQIASDPNA

SEQ ID NO: 210 - protein, 9 aa, synthetic construct
AQQGTNHYA

SEQ ID NO: 211 - protein, 9 aa, synthetic construct
AQIPNLREG

SEQ ID NO: 212 - protein, 9 aa, synthetic construct
AQMQGMKFQ

SEQ ID NO: 213 - protein, 9 aa, synthetic construct
AQNATRANP

SEQ ID NO: 214 - protein, 9 aa, synthetic construct
AQLPHSSTH

SEQ ID NO: 215 - protein, 9 aa, synthetic construct
AQRTPTMMM

SEQ ID NO: 216 - protein, 9 aa, synthetic construct
AQKSPGPFV

SEQ ID NO: 217 - protein, 9 aa, synthetic construct
AQNQGSPNH

SEQ ID NO: 218 - protein, 9 aa, synthetic construct
AQAPMGYRG

SEQ ID NO: 219 - protein, 9 aa, synthetic construct
AQAMSNFSP

SEQ ID NO: 220 - protein, 9 aa, synthetic construct
AQTVCLGLR

SEQ ID NO: 221 - protein, 9 aa, synthetic construct
AQNDLQRNA

SEQ ID NO: 222 - protein, 9 aa, synthetic construct
AQGAGSSIS

SEQ ID NO: 223 - protein, 9 aa, synthetic construct
AQKHGSSSM

SEQ ID NO: 224 - protein, 9 aa, synthetic construct
AQNLYTPHP

SEQ ID NO: 225 - protein, 9 aa, synthetic construct
AQRNKPGDD

SEQ ID NO: 226 - protein, 9 aa, synthetic construct
AQRTPPYSN

SEQ ID NO: 227 - protein, 9 aa, synthetic construct
AQVGANHFS

SEQ ID NO: 228 - protein, 9 aa, synthetic construct
AQGARLTTT

SEQ ID NO: 229 - protein, 9 aa, synthetic construct
AQTVVLGIS

SEQ ID NO: 230 - protein, 9 aa, synthetic construct
AQIIRRVLL

SEQ ID NO: 231 - protein, 9 aa, synthetic construct
AQQGDRKST

SEQ ID NO: 232 - protein, 9 aa, synthetic construct
AQRVGFKTK

SEQ ID NO: 233 - protein, 9 aa, synthetic construct
AQEHTLNSS

SEQ ID NO: 234 - protein, 9 aa, synthetic construct
AQHTSELQS

SEQ ID NO: 235 - protein, 9 aa, synthetic construct
AQSTGWVQN

SEQ ID NO: 236 - protein, 9 aa, synthetic construct
AQGLSGLLS

SEQ ID NO: 237 - protein, 9 aa, synthetic construct
AQECGGGGG

SEQ ID NO: 238 - protein, 9 aa, synthetic construct
AQRAAVCIL

SEQ ID NO: 239 - protein, 9 aa, synthetic construct
AQCVLKCGE

SEQ ID NO: 240 - protein, 9 aa, synthetic construct
AQSTRLNST

SEQ ID NO: 241 - protein, 9 aa, synthetic construct
AQVRIRRLM

SEQ ID NO: 242 - protein, 9 aa, synthetic construct
AQWKFVATE

SEQ ID NO: 243 - protein, 9 aa, synthetic construct
AQGCMLRKE

SEQ ID NO: 244 - protein, 9 aa, synthetic construct
AQGVVAMAR

SEQ ID NO: 245 - protein, 9 aa, synthetic construct
AQKMWPTHD

SEQ ID NO: 246 - protein, 9 aa, synthetic construct
AQAVVRTDG

SEQ ID NO: 247 - protein, 9 aa, synthetic construct
AQMNPSSSR

SEQ ID NO: 248 - protein, 9 aa, synthetic construct
AQSRLGSKP

SEQ ID NO: 249 - protein, 9 aa, synthetic construct
AQRVDQTHQ

SEQ ID NO: 250 - protein, 9 aa, synthetic construct
AQARTKLYL

SEQ ID NO: 251 - protein, 9 aa, synthetic construct
AQLPVCTPA

SEQ ID NO: 252 - protein, 9 aa, synthetic construct
AQTTALQYS

SEQ ID NO: 253 - protein, 9 aa, synthetic construct
AQGKNACFE

SEQ ID NO: 254 - protein, 9 aa, synthetic construct
AQKARVSFA

SEQ ID NO: 255 - protein, 9 aa, synthetic construct
AQPTLQFNE

SEQ ID NO: 256 - protein, 9 aa, synthetic construct
AQQNRLRFK

SEQ ID NO: 257 - protein, 9 aa, synthetic construct
AQVRYVCLD

SEQ ID NO: 258 - protein, 9 aa, synthetic construct
AQQSLMDLV

SEQ ID NO: 259 - protein, 9 aa, synthetic construct
AQNPERVVA

SEQ ID NO: 260 - protein, 9 aa, synthetic construct
AQSFVRFSW

SEQ ID NO: 261 - protein, 9 aa, synthetic construct
AQLRVGLSV

SEQ ID NO: 262 - protein, 9 aa, synthetic construct
AQNQGDRKS

SEQ ID NO: 263 - protein, 9 aa, synthetic construct
AQDKPGQGK

SEQ ID NO: 264 - protein, 9 aa, synthetic construct
AQSTRLNCW

SEQ ID NO: 265 - protein, 9 aa, synthetic construct
AQSLKCDIR

SEQ ID NO: 266 - protein, 9 aa, synthetic construct
AQMSSTCMA

SEQ ID NO: 267 - protein, 9 aa, synthetic construct
AQGNSLRYS

SEQ ID NO: 268 - protein, 9 aa, synthetic construct
AQSFRKCDV

SEQ ID NO: 269 - protein, 9 aa, synthetic construct
AQTSLRVNC

SEQ ID NO: 270 - protein, 9 aa, synthetic construct
AQMNTRTIK

SEQ ID NO: 271 - protein, 9 aa, synthetic construct
AQMMECRQA

SEQ ID NO: 272 - protein, 9 aa, synthetic construct
AQGICYGRY

SEQ ID NO: 273 - protein, 9 aa, synthetic construct
AQHTGHKTN

SEQ ID NO: 274 - protein, 9 aa, synthetic construct
AQTMLRYGD

SEQ ID NO: 275 - protein, 9 aa, synthetic construct
AQSVTKNGV

SEQ ID NO: 276 - protein, 9 aa, synthetic construct
AQQLCDPDY

SEQ ID NO: 277 - protein, 9 aa, synthetic construct
AQTINSKTA

SEQ ID NO: 278 - protein, 9 aa, synthetic construct
AQQKCRYGD

SEQ ID NO: 279 - protein, 9 aa, synthetic construct
AQTVIKMMS

SEQ ID NO: 280 - protein, 9 aa, synthetic construct
AQNTGSIRL

SEQ ID NO: 281 - protein, 9 aa, synthetic construct
AQSTVGFKT

SEQ ID NO: 282 - protein, 9 aa, synthetic construct
AQSMVRING

SEQ ID NO: 283 - protein, 9 aa, synthetic construct
AQTLIRASL

SEQ ID NO: 284 - protein, 9 aa, synthetic construct
AQIGVIHCA

SEQ ID NO: 285 - protein, 9 aa, synthetic construct
AQPTSSGVE

SEQ ID NO: 286 - protein, 9 aa, synthetic construct
AQGEERRIA

SEQ ID NO: 287 - protein, 9 aa, synthetic construct
AQQVTYQKN

SEQ ID NO: 288 - protein, 9 aa, synthetic construct
AQEHTSESS

SEQ ID NO: 289 - protein, 9 aa, synthetic construct
AQWNYMNRA

SEQ ID NO: 290 - protein, 9 aa, synthetic construct
AQVRESAMN

SEQ ID NO: 291 - protein, 9 aa, synthetic construct
AQLRCSVGE

SEQ ID NO: 292 - protein, 9 aa, synthetic construct
AQDKPGQAK

SEQ ID NO: 293 - protein, 9 aa, synthetic construct
AQRWLRVGL

SEQ ID NO: 294 - protein, 9 aa, synthetic construct
AQYDPLTVK

SEQ ID NO: 295 - protein, 9 aa, synthetic construct
AQRGTSFRS

SEQ ID NO: 296 - protein, 9 aa, synthetic construct
AQCLSSVVC

SEQ ID NO: 297 - protein, 9 aa, synthetic construct
AQSRTQRVM

SEQ ID NO: 298 - protein, 9 aa, synthetic construct
AQAVVREGY

SEQ ID NO: 299 - protein, 9 aa, synthetic construct
AQVFTSKLC

SEQ ID NO: 300 - protein, 9 aa, synthetic construct
AQMRDKCTS

SEQ ID NO: 301 - protein, 9 aa, synthetic construct
AQGMRTKYN

SEQ ID NO: 302 - protein, 9 aa, synthetic construct
AQLLKEACW

SEQ ID NO: 303 - protein, 9 aa, synthetic construct
AQVVLNACK

SEQ ID NO: 304 - protein, 9 aa, synthetic construct
AQQSSYKCQ

SEQ ID NO: 305 - protein, 9 aa, synthetic construct
AQTQSMQYT

SEQ ID NO: 306 - protein, 9 aa, synthetic construct
AQTKEIGRA

SEQ ID NO: 307 - protein, 9 aa, synthetic construct
AQIINCAET

SEQ ID NO: 308 - protein, 9 aa, synthetic construct
AQPLNVKEQ

SEQ ID NO: 309 - protein, 9 aa, synthetic construct
AQVCTMPLY

SEQ ID NO: 310 - protein, 9 aa, synthetic construct
AQLTHTVNL

SEQ ID NO: 311 - protein, 9 aa, synthetic construct
AQPESETVT

SEQ ID NO: 312 - protein, 9 aa, synthetic construct
AQNCQKHAS

SEQ ID NO: 313 - protein, 9 aa, synthetic construct
AQLRTFSWT

SEQ ID NO: 314 - protein, 9 aa, synthetic construct
AQRECSSAD

SEQ ID NO: 315 - protein, 9 aa, synthetic construct
AQYCQGLLT

SEQ ID NO: 316 - protein, 9 aa, synthetic construct
AQLKAYRCA

SEQ ID NO: 317 - protein, 9 aa, synthetic construct
AQVNERRSR

SEQ ID NO: 318 - protein, 9 aa, synthetic construct
AQNRRSQTG

SEQ ID NO: 319 - protein, 9 aa, synthetic construct
AQKMQIIIS

SEQ ID NO: 320 - protein, 9 aa, synthetic construct
AQINSCEEH

SEQ ID NO: 321 - protein, 9 aa, synthetic construct
AQVARTVCG

SEQ ID NO: 322 - protein, 9 aa, synthetic construct
AQNDEYMCL

SEQ ID NO: 323 - protein, 9 aa, synthetic construct
AQICIPSQS

SEQ ID NO: 324 - protein, 9 aa, synthetic construct
AQEHRLNSS

SEQ ID NO: 325 - protein, 9 aa, synthetic construct
AQSWKGDVD

SEQ ID NO: 326 - protein, 9 aa, synthetic construct
AQQASCAHV

SEQ ID NO: 327 - protein, 9 aa, synthetic construct
AQGGARGYT

SEQ ID NO: 328 - protein, 9 aa, synthetic construct
AQAGKLFNR

SEQ ID NO: 329 - protein, 9 aa, synthetic construct
AQEPNKHCV

SEQ ID NO: 330 - protein, 9 aa, synthetic construct
AQCNADIVS

SEQ ID NO: 331 - protein, 9 aa, synthetic construct
AQDRGSFVS

SEQ ID NO: 332 - protein, 9 aa, synthetic construct
AQSTKMQMS

SEQ ID NO: 333 - protein, 9 aa, synthetic construct
AQGSKPRRS

SEQ ID NO: 334 - protein, 9 aa, synthetic construct
AQRAFVELS

SEQ ID NO: 335 - protein, 9 aa, synthetic construct
AQNSSVNRC

SEQ ID NO: 336 - protein, 9 aa, synthetic construct
AQRNPIGVL

SEQ ID NO: 337 - protein, 9 aa, synthetic construct
AQILVLLIR

SEQ ID NO: 338 - protein, 9 aa, synthetic construct
AQMDMTMRN

SEQ ID NO: 339 - protein, 9 aa, synthetic construct
AQAISWKSG

SEQ ID NO: 340 - protein, 9 aa, synthetic construct
AQLSSPCSV

SEQ ID NO: 341 - protein, 9 aa, synthetic construct
AQPMHNMRW

SEQ ID NO: 342 - protein, 9 aa, synthetic construct
AQGKIKAFL

SEQ ID NO: 343 - protein, 9 aa, synthetic construct
AQKLSNAMC

SEQ ID NO: 344 - protein, 9 aa, synthetic construct
AQKPQLLCA

SEQ ID NO: 345 - protein, 9 aa, synthetic construct
AQRNEADSC

SEQ ID NO: 346 - protein, 9 aa, synthetic construct
AQPRNIRLS

SEQ ID NO: 347 - protein, 9 aa, synthetic construct
AQLASHCNS

SEQ ID NO: 348 - protein, 9 aa, synthetic construct
AQGTGLCNA

SEQ ID NO: 349 - protein, 9 aa, synthetic construct
AQNRQCSVM

SEQ ID NO: 350 - protein, 9 aa, synthetic construct
AQSSSHLRS

SEQ ID NO: 351 - protein, 9 aa, synthetic construct
AQIYRGGVE

SEQ ID NO: 352 - protein, 9 aa, synthetic construct
AQMETQCKT

SEQ ID NO: 353 - protein, 9 aa, synthetic construct
AQAYDPNKY

SEQ ID NO: 354 - protein, 9 aa, synthetic construct
AQLTSFGAA

SEQ ID NO: 355 - protein, 9 aa, synthetic construct
AQGIDDLCT

SEQ ID NO: 356 - protein, 9 aa, synthetic construct
AQGPYLCSD

SEQ ID NO: 357 - protein, 9 aa, synthetic construct
AQMTRPDPC

SEQ ID NO: 358 - protein, 9 aa, synthetic construct
AQKMNPRHM

SEQ ID NO: 359 - protein, 9 aa, synthetic construct
AQEIRHPNS

SEQ ID NO: 360 - protein, 9 aa, synthetic construct
AQVSTCIDI

SEQ ID NO: 361 - protein, 9 aa, synthetic construct
AQKHENDAC

SEQ ID NO: 362 - protein, 9 aa, synthetic construct
AQMPFIAKS

SEQ ID NO: 363 - protein, 9 aa, synthetic construct
AQLFGLTAC

SEQ ID NO: 364 - protein, 9 aa, synthetic construct
AQFMPDFQS

SEQ ID NO: 365 - protein, 9 aa, synthetic construct
AQALPMMRL

SEQ ID NO: 366 - protein, 9 aa, synthetic construct
AQGKCFEHM

SEQ ID NO: 367 - protein, 9 aa, synthetic construct
AQSCNSSCL

SEQ ID NO: 368 - protein, 9 aa, synthetic construct
AQADSSCNM

SEQ ID NO: 369 - protein, 9 aa, synthetic construct
AQNHVDAVR

SEQ ID NO: 370 - protein, 9 aa, synthetic construct
AQVARTSGN

SEQ ID NO: 371 - protein, 9 aa, synthetic construct
AQIPSREHK

SEQ ID NO: 372 - protein, 9 aa, synthetic construct
AQQHSLRFK

SEQ ID NO: 373 - protein, 9 aa, synthetic construct
AQCNITQRA

SEQ ID NO: 374 - protein, 9 aa, synthetic construct
AQSVYCGAV

SEQ ID NO: 375 - protein, 9 aa, synthetic construct
AQCRTSSGD

SEQ ID NO: 376 - protein, 9 aa, synthetic construct
AQVPTKHSH

SEQ ID NO: 377 - protein, 9 aa, synthetic construct
AQGVIDARC

SEQ ID NO: 378 - protein, 9 aa, synthetic construct
AQSQTMMTR

SEQ ID NO: 379 - protein, 9 aa, synthetic construct
AQCTGDLRE

SEQ ID NO: 380 - protein, 9 aa, synthetic construct
AQLGHTSCS

SEQ ID NO: 381 - protein, 9 aa, synthetic construct
AQRRSIRAF

SEQ ID NO: 382 - protein, 9 aa, synthetic construct
AQFLKSARS

SEQ ID NO: 383 - protein, 9 aa, synthetic construct
AQISRVRLR

SEQ ID NO: 384 - protein, 9 aa, synthetic construct
AQAGCNNLD

SEQ ID NO: 385 - protein, 9 aa, synthetic construct
AQKHVSNED

SEQ ID NO: 386 - protein, 9 aa, synthetic construct
AQFPNLVCP

SEQ ID NO: 387 - protein, 9 aa, synthetic construct
AQECYQMRS

SEQ ID NO: 388 - protein, 9 aa, synthetic construct
AQGHDRNPR

SEQ ID NO: 389 - protein, 9 aa, synthetic construct
AQIGCYESK

SEQ ID NO: 390 - protein, 9 aa, synthetic construct
AQHSVASDC

SEQ ID NO: 391 - protein, 9 aa, synthetic construct
AQIKVVGLS

SEQ ID NO: 392 - protein, 9 aa, synthetic construct
AQEHTSDSS

SEQ ID NO: 393 - protein, 9 aa, synthetic construct
AQFGLEVAV

SEQ ID NO: 394 - protein, 9 aa, synthetic construct
AQRVVVCTG

SEQ ID NO: 395 - protein, 9 aa, synthetic construct
AQKHKMCQG

SEQ ID NO: 396 - protein, 9 aa, synthetic construct
AQAWWQEFG

SEQ ID NO: 397 - protein, 9 aa, synthetic construct
AQLCQPTRN

SEQ ID NO: 398 - protein, 9 aa, synthetic construct
AQLVAGREL

SEQ ID NO: 399 - protein, 9 aa, synthetic construct
AQCSQVKLT

SEQ ID NO: 400 - protein, 9 aa, synthetic construct
AQTRIVRNL

SEQ ID NO: 401 - protein, 9 aa, synthetic construct
AQQGYCNEY

SEQ ID NO: 402 - protein, 9 aa, synthetic construct
AQCGEMWGW

SEQ ID NO: 403 - protein, 9 aa, synthetic construct
AQEHTSALQ

SEQ ID NO: 404 - protein, 9 aa, synthetic construct
AQRDMTYPW

SEQ ID NO: 405 - protein, 9 aa, synthetic construct
AQSPVRCGL

SEQ ID NO: 406 - protein, 9 aa, synthetic construct
AQEQRLNSS

SEQ ID NO: 407 - protein, 9 aa, synthetic construct
AQVSVTVVA

SEQ ID NO: 408 - protein, 9 aa, synthetic construct
AQMGHYSVH

SEQ ID NO: 409 - protein, 9 aa, synthetic construct
AQLMASNAA

SEQ ID NO: 410 - protein, 9 aa, synthetic construct
AQVVESHIR

SEQ ID NO: 411 - protein, 9 aa, synthetic construct
AQFPEQFLV

SEQ ID NO: 412 - protein, 9 aa, synthetic construct
AQSEVSAFI

SEQ ID NO: 413 - protein, 9 aa, synthetic construct
AQWGQTVPG

SEQ ID NO: 414 - protein, 9 aa, synthetic construct
AQHGGGSRY

SEQ ID NO: 415 - protein, 9 aa, synthetic construct
AQVICSALT

SEQ ID NO: 416 - protein, 9 aa, synthetic construct
AQIICSGVK

SEQ ID NO: 417 - protein, 9 aa, synthetic construct
AQLICSTIM

SEQ ID NO: 418 - protein, 9 aa, synthetic construct
AQIICSEIV

SEQ ID NO: 419 - protein, 9 aa, synthetic construct
AQTMVGPGV

SEQ ID NO: 420 - protein, 9 aa, synthetic construct
AQVICDSRN

SEQ ID NO: 421 - protein, 9 aa, synthetic construct
AQSELQAFV

SEQ ID NO: 422 - protein, 9 aa, synthetic construct
AQLVCSTLR

SEQ ID NO: 423 - protein, 9 aa, synthetic construct
AQTIMSHNV

SEQ ID NO: 424 - protein, 9 aa, synthetic construct
AQTATGGKT

SEQ ID NO: 425 - protein, 9 aa, synthetic construct
AQIIESHVR

SEQ ID NO: 426 - protein, 9 aa, synthetic construct
AQFVEQFIR

SEQ ID NO: 427 - protein, 9 aa, synthetic construct
AQVVCANIV

SEQ ID NO: 428 - protein, 9 aa, synthetic construct
AQLICSTLV

SEQ ID NO: 429 - protein, 9 aa, synthetic construct
AQIICSDIR

SEQ ID NO: 430 - protein, 9 aa, synthetic construct
AQEPSRVGN

SEQ ID NO: 431 - protein, 9 aa, synthetic construct
AQLICSTLI

SEQ ID NO: 432 - protein, 9 aa, synthetic construct
AQVPEQHIK

SEQ ID NO: 433 - protein, 9 aa, synthetic construct
AQTVRTGIS

SEQ ID NO: 434 - protein, 9 aa, synthetic construct
AQSVWTGSV

SEQ ID NO: 435 - protein, 9 aa, synthetic construct
AQIICTTVR

SEQ ID NO: 436 - protein, 9 aa, synthetic construct
AQVIEGHFK

SEQ ID NO: 437 - protein, 9 aa, synthetic construct
AQTILQLGE

SEQ ID NO: 438 - protein, 9 aa, synthetic construct
AQTISTGIY

SEQ ID NO: 439 - protein, 9 aa, synthetic construct
AQMESQYAW

SEQ ID NO: 440 - protein, 9 aa, synthetic construct
AQLVCSNLR

SEQ ID NO: 441 - protein, 9 aa, synthetic construct
AQVICSNLY

SEQ ID NO: 442 - protein, 9 aa, synthetic construct
AQTYPKYAT

SEQ ID NO: 443 - protein, 9 aa, synthetic construct
AQIVCAHRI

SEQ ID NO: 444 - protein, 9 aa, synthetic construct
AQYKERIRD

SEQ ID NO: 445 - protein, 9 aa, synthetic construct
AQKPGRPII

SEQ ID NO: 446 - protein, 9 aa, synthetic construct
AQVICSSML

SEQ ID NO: 447 - protein, 9 aa, synthetic construct
AQVLCSSIK

SEQ ID NO: 448 - protein, 9 aa, synthetic construct
AQTYPNYNS

SEQ ID NO: 449 - protein, 9 aa, synthetic construct
AQVVCSTVR

SEQ ID NO: 450 - protein, 9 aa, synthetic construct
AQVVCSHTM

SEQ ID NO: 451 - protein, 9 aa, synthetic construct
AQSNSIRNT

SEQ ID NO: 452 - protein, 9 aa, synthetic construct
AQTELTAFP

SEQ ID NO: 453 - protein, 9 aa, synthetic construct
AQDNRTPGR

SEQ ID NO: 454 - protein, 9 aa, synthetic construct
AQVICSALS

SEQ ID NO: 455 - protein, 9 aa, synthetic construct
AQIMDNMRW

SEQ ID NO: 456 - protein, 9 aa, synthetic construct
AQLICANMV

SEQ ID NO: 457 - protein, 9 aa, synthetic construct
AQRVPMNRG

SEQ ID NO: 458 - protein, 9 aa, synthetic construct
AQTQSPLPM

SEQ ID NO: 459 - protein, 9 aa, synthetic construct
AQVVCSGMR

SEQ ID NO: 460 - protein, 9 aa, synthetic construct
AQLICTTIK

SEQ ID NO: 461 - protein, 9 aa, synthetic construct
AQRDSMSTR

SEQ ID NO: 462 - protein, 9 aa, synthetic construct
AQSMAQNNK

SEQ ID NO: 463 - protein, 9 aa, synthetic construct
AQNMSLAFK

SEQ ID NO: 464 - protein, 9 aa, synthetic construct
AQSTSTHNY

SEQ ID NO: 465 - protein, 9 aa, synthetic construct
AQHSRNVVQ

SEQ ID NO: 466 - protein, 9 aa, synthetic construct
AQLICSGLN

SEQ ID NO: 467 - protein, 9 aa, synthetic construct
AQIRNIRNA

SEQ ID NO: 468 - protein, 9 aa, synthetic construct
AQLLCTTIR

SEQ ID NO: 469 - protein, 9 aa, synthetic construct
AQVLCSGLI

SEQ ID NO: 470 - protein, 9 aa, synthetic construct
AQAMTALGA

SEQ ID NO: 471 - protein, 9 aa, synthetic construct
AQQNSMSFK

SEQ ID NO: 472 - protein, 9 aa, synthetic construct
AQLKPKAYG

SEQ ID NO: 473 - protein, 9 aa, synthetic construct
AQIGDYFGV

SEQ ID NO: 474 - protein, 9 aa, synthetic construct
AQAICSTIW

SEQ ID NO: 475 - protein, 9 aa, synthetic construct
AQRMSSNYN

SEQ ID NO: 476 - protein, 9 aa, synthetic construct
AQSVISLGE

SEQ ID NO: 477 - protein, 9 aa, synthetic construct
AQGGPMKKI

SEQ ID NO: 478 - protein, 9 aa, synthetic construct
AQNPVARSY

SEQ ID NO: 479 - protein, 9 aa, synthetic construct
AQIHSNIRS

SEQ ID NO: 480 - protein, 9 aa, synthetic construct
AQNVVGLGK

SEQ ID NO: 481 - protein, 9 aa, synthetic construct
AQTVSYQVN

SEQ ID NO: 482 - protein, 9 aa, synthetic construct
AQYPEMHIR

SEQ ID NO: 483 - protein, 9 aa, synthetic construct
AQFGKTWHV

SEQ ID NO: 484 - protein, 9 aa, synthetic construct
AQAYDPNAR

SEQ ID NO: 485 - protein, 9 aa, synthetic construct
AQFVNMRSG

SEQ ID NO: 486 - protein, 9 aa, synthetic construct
AQTMLKAGE

SEQ ID NO: 487 - protein, 9 aa, synthetic construct
AQKAGSSFK

SEQ ID NO: 488 - protein, 9 aa, synthetic construct
AQRALERKG

SEQ ID NO: 489 - protein, 9 aa, synthetic construct
AQVLCSSLK

SEQ ID NO: 490 - protein, 9 aa, synthetic construct
AQSSCYGVW

SEQ ID NO: 491 - protein, 9 aa, synthetic construct
AQFSAGWKA

SEQ ID NO: 492 - protein, 9 aa, synthetic construct
AQSVIKSGE

SEQ ID NO: 493 - protein, 9 aa, synthetic construct
AQLLEPTRM

SEQ ID NO: 494 - protein, 9 aa, synthetic construct
AQSTLNQRS

SEQ ID NO: 495 - protein, 9 aa, synthetic construct
AQSHTSTRL

SEQ ID NO: 496 - protein, 9 aa, synthetic construct
AQKSGGCAG

SEQ ID NO: 497 - protein, 9 aa, synthetic construct
AQTARSGIY

SEQ ID NO: 498 - protein, 9 aa, synthetic construct
AQSMTAKNL

SEQ ID NO: 499 - protein, 9 aa, synthetic construct
AQVVEGHVK

SEQ ID NO: 500 - protein, 9 aa, synthetic construct
AQDNRATRS

SEQ ID NO: 501 - protein, 9 aa, synthetic construct
AQSVSAQRS

SEQ ID NO: 502 - protein, 9 aa, synthetic construct
AQSPGLRTS

SEQ ID NO: 503 - protein, 9 aa, synthetic construct
AQLICSSVV

SEQ ID NO: 504 - protein, 9 aa, synthetic construct
AQESSYSYK

SEQ ID NO: 505 - protein, 9 aa, synthetic construct
AQLVCTTQR

SEQ ID NO: 506 - protein, 9 aa, synthetic construct
AQQWELTPM

SEQ ID NO: 507 - protein, 9 aa, synthetic construct
AQVICSELT

SEQ ID NO: 508 - protein, 9 aa, synthetic construct
AQRPNRPLN

SEQ ID NO: 509 - protein, 9 aa, synthetic construct
AQDARLLRT

SEQ ID NO: 510 - protein, 9 aa, synthetic construct
AQNSVSGRF

SEQ ID NO: 511 - protein, 9 aa, synthetic construct
AQTVQHQSS

SEQ ID NO: 512 - protein, 9 aa, synthetic construct
AQNEVVWRV

SEQ ID NO: 513 - protein, 9 aa, synthetic construct
AQHPLLTFG

SEQ ID NO: 514 - protein, 9 aa, synthetic construct
AQGKGLSTI

SEQ ID NO: 515 - protein, 9 aa, synthetic construct
AQVQFNRDF

SEQ ID NO: 516 - protein, 9 aa, synthetic construct
AQSVLHQIH

SEQ ID NO: 517 - protein, 9 aa, synthetic construct
AQLICTTLY

SEQ ID NO: 518 - protein, 9 aa, synthetic construct
AQHPVGLGM

SEQ ID NO: 519 - protein, 9 aa, synthetic construct
AQQNMRYQG

SEQ ID NO: 520 - protein, 9 aa, synthetic construct
AQVREKDKN

SEQ ID NO: 521 - protein, 9 aa, synthetic construct
AQNIRVQID

SEQ ID NO: 522 - protein, 9 aa, synthetic construct
AQVISYQIN

SEQ ID NO: 523 - protein, 9 aa, synthetic construct
AQTTTSQRE

SEQ ID NO: 524 - protein, 9 aa, synthetic construct
AQQQRPSLT

SEQ ID NO: 525 - protein, 9 aa, synthetic construct
AQETALRRA

SEQ ID NO: 526 - protein, 9 aa, synthetic construct
AQDWAVCAN

SEQ ID NO: 527 - protein, 9 aa, synthetic construct
AQQDPVRKT

SEQ ID NO: 528 - protein, 9 aa, synthetic construct
AQVICSKLV

SEQ ID NO: 529 - protein, 9 aa, synthetic construct
AQDSSPNKP

SEQ ID NO: 530 - protein, 9 aa, synthetic construct
AQRPRNPTG

SEQ ID NO: 531 - protein, 9 aa, synthetic construct
AQMLCTTIR

SEQ ID NO: 532 - protein, 9 aa, synthetic construct
AQSRYNSKP

SEQ ID NO: 533 - protein, 9 aa, synthetic construct
AQQDKPNRT

SEQ ID NO: 534 - protein, 9 aa, synthetic construct
AQTGTKVYI

SEQ ID NO: 535 - protein, 9 aa, synthetic construct
AQPMPRSPG

SEQ ID NO: 536 - protein, 9 aa, synthetic construct
AQTFKVQRD

SEQ ID NO: 537 - protein, 9 aa, synthetic construct
AQIVCSQLV

SEQ ID NO: 538 - protein, 9 aa, synthetic construct
AQTLRNGIS

SEQ ID NO: 539 - protein, 9 aa, synthetic construct
AQFINGPEH

SEQ ID NO: 540 - protein, 9 aa, synthetic construct
AQNAMRQIT

SEQ ID NO: 541 - protein, 9 aa, synthetic construct
AQRGLQNNK

SEQ ID NO: 542 - protein, 9 aa, synthetic construct
AQSVTFQLS

SEQ ID NO: 543 - protein, 9 aa, synthetic construct
AQLSGGLRT

SEQ ID NO: 544 - protein, 9 aa, synthetic construct
AQRDKIGHG

SEQ ID NO: 545 - protein, 9 aa, synthetic construct
AQRMLKHVN

SEQ ID NO: 546 - protein, 9 aa, synthetic construct
AQTAWEYDN

SEQ ID NO: 547 - protein, 9 aa, synthetic construct
AQKPIGMGN

SEQ ID NO: 548 - protein, 9 aa, synthetic construct
AQIVCANNR

SEQ ID NO: 549 - protein, 9 aa, synthetic construct
AQLAERSRM

SEQ ID NO: 550 - protein, 9 aa, synthetic construct
AQGGLPKYG

SEQ ID NO: 551 - protein, 9 aa, synthetic construct
AQFIVSHNV

SEQ ID NO: 552 - protein, 9 aa, synthetic construct
AQRLERSVL

SEQ ID NO: 553 - protein, 9 aa, synthetic construct
AQRSDIRRP

SEQ ID NO: 554 - protein, 9 aa, synthetic construct
AQSPVKTGL

SEQ ID NO: 555 - protein, 9 aa, synthetic construct
AQVREFKKD

SEQ ID NO: 556 - protein, 9 aa, synthetic construct
AQMLKMLVA

SEQ ID NO: 557 - protein, 9 aa, synthetic construct
AQTPLALGE

SEQ ID NO: 558 - protein, 9 aa, synthetic construct
AQRSTVTNM

SEQ ID NO: 559 - protein, 9 aa, synthetic construct
AQVRLLAKP

SEQ ID NO: 560 - protein, 9 aa, synthetic construct
AQRAELTKY

SEQ ID NO: 561 - protein, 9 aa, synthetic construct
AQGRLKENM

SEQ ID NO: 562 - protein, 9 aa, synthetic construct
AQNITKLGA

SEQ ID NO: 563 - protein, 9 aa, synthetic construct
AQHTNARIL

SEQ ID NO: 564 - protein, 9 aa, synthetic construct
AQSASKSWS

SEQ ID NO: 565 - protein, 9 aa, synthetic construct
AQAFDVNGR

SEQ ID NO: 566 - protein, 9 aa, synthetic construct
AQVICAYLM

SEQ ID NO: 567 - protein, 9 aa, synthetic construct
AQTTTNQIK

SEQ ID NO: 568 - protein, 9 aa, synthetic construct
AQSLVRMGE

SEQ ID NO: 569 - protein, 9 aa, synthetic construct
AQVSVRPER

SEQ ID NO: 570 - protein, 9 aa, synthetic construct
AQRKESCSR

SEQ ID NO: 571 - protein, 9 aa, synthetic construct
AQVQEVANR

SEQ ID NO: 572 - protein, 9 aa, synthetic construct
AQTTNTGIS

SEQ ID NO: 573 - protein, 9 aa, synthetic construct
AQVGEVRLK

SEQ ID NO: 574 - protein, 9 aa, synthetic construct
AQGQDPVKN

SEQ ID NO: 575 - protein, 9 aa, synthetic construct
AQGGGLTYV

SEQ ID NO: 576 - protein, 9 aa, synthetic construct
AQVLCTYNK

SEQ ID NO: 577 - protein, 9 aa, synthetic construct
AQNHIRPGA

SEQ ID NO: 578 - protein, 9 aa, synthetic construct
AQRFQVNSR

SEQ ID NO: 579 - protein, 9 aa, synthetic construct
AQYTTQQTS

SEQ ID NO: 580 - protein, 9 aa, synthetic construct
AQHIGLQID

SEQ ID NO: 581 - protein, 9 aa, synthetic construct
AQGSRSSFN

SEQ ID NO: 582 - protein, 9 aa, synthetic construct
AQRDGGRSV

SEQ ID NO: 583 - protein, 9 aa, synthetic construct
AQGVAKLGL

SEQ ID NO: 584 - protein, 9 aa, synthetic construct
AQNQTPIRS

SEQ ID NO: 585 - protein, 9 aa, synthetic construct
AQVKRMINL

SEQ ID NO: 586 - protein, 9 aa, synthetic construct
AQNTLSQMS

SEQ ID NO: 587 - protein, 9 aa, synthetic construct
AQLICSTVV

SEQ ID NO: 588 - protein, 9 aa, synthetic construct
AQVMRMQDK

SEQ ID NO: 589 - protein, 9 aa, synthetic construct
AQSPFKGGV

SEQ ID NO: 590 - protein, 9 aa, synthetic construct
AQHVSKMHG

SEQ ID NO: 591 - protein, 9 aa, synthetic construct
AQLSQGLRH

SEQ ID NO: 592 - protein, 9 aa, synthetic construct
AQSSRQGPA

SEQ ID NO: 593 - protein, 9 aa, synthetic construct
AQNMLGLGQ

SEQ ID NO: 594 - protein, 9 aa, synthetic construct
AQTICTTIR

SEQ ID NO: 595 - protein, 9 aa, synthetic construct
AQFMTRQSM

SEQ ID NO: 596 - protein, 9 aa, synthetic construct
AQLVCSDLV

SEQ ID NO: 597 - protein, 9 aa, synthetic construct
AQTMALGIS

SEQ ID NO: 598 - protein, 9 aa, synthetic construct
AQMYGLMEE

SEQ ID NO: 599 - protein, 9 aa, synthetic construct
AQLTTHQVS

SEQ ID NO: 600 - protein, 9 aa, synthetic construct
AQWCTRPCG

SEQ ID NO: 601 - protein, 9 aa, synthetic construct
AQSVATPRS

SEQ ID NO: 602 - protein, 9 aa, synthetic construct
AQALTVRSM

SEQ ID NO: 603 - protein, 9 aa, synthetic construct
AQSSRTTYA

SEQ ID NO: 604 - protein, 9 aa, synthetic construct
AQPYDPNRN

SEQ ID NO: 605 - protein, 9 aa, synthetic construct
AQNSRLSNT

SEQ ID NO: 606 - protein, 9 aa, synthetic construct
AQVSNHSLR

SEQ ID NO: 607 - protein, 9 aa, synthetic construct
AQEPTLKRT

SEQ ID NO: 608 - protein, 9 aa, synthetic construct
AQAVTPRNI

SEQ ID NO: 609 - protein, 9 aa, synthetic construct
AQQSPVKMD

SEQ ID NO: 610 - protein, 9 aa, synthetic construct
AQRGHVGNG

SEQ ID NO: 611 - protein, 9 aa, synthetic construct
AQHRLSVPS

SEQ ID NO: 612 - protein, 9 aa, synthetic construct
AQYGKWVQA

SEQ ID NO: 613 - protein, 9 aa, synthetic construct
AQLKAHGYS

SEQ ID NO: 614 - protein, 9 aa, synthetic construct
AQIGERPSL

SEQ ID NO: 615 - protein, 9 aa, synthetic construct
AQTVLKQIE

SEQ ID NO: 616 - protein, 9 aa, synthetic construct
AQIATIKSK

SEQ ID NO: 617 - protein, 9 aa, synthetic construct
AQVVCSTIR

SEQ ID NO: 618 - protein, 9 aa, synthetic construct
AQSPIGIHG

SEQ ID NO: 619 - protein, 9 aa, synthetic construct
AQQAPIRLG

SEQ ID NO: 620 - protein, 9 aa, synthetic construct
AQIICSGYK

SEQ ID NO: 621 - protein, 9 aa, synthetic construct
AQTRINGIY

SEQ ID NO: 622 - protein, 9 aa, synthetic construct
AQSMTGIGM

SEQ ID NO: 623 - protein, 9 aa, synthetic construct
AQRVTGMGH

SEQ ID NO: 624 - protein, 9 aa, synthetic construct
AQLHTRTST

SEQ ID NO: 625 - protein, 9 aa, synthetic construct
AQLNKRIVY

SEQ ID NO: 626 - protein, 9 aa, synthetic construct
AQTTTLQVD

SEQ ID NO: 627 - protein, 9 aa, synthetic construct
AQNKLDRRN

SEQ ID NO: 628 - protein, 9 aa, synthetic construct
AQTVTMQYA

SEQ ID NO: 629 - protein, 9 aa, synthetic construct
AQSMTPHPG

SEQ ID NO: 630 - protein, 9 aa, synthetic construct
AQYRSPNVK

SEQ ID NO: 631 - protein, 9 aa, synthetic construct
AQLICTSLM

SEQ ID NO: 632 - protein, 9 aa, synthetic construct
AQRSHTTLT

SEQ ID NO: 633 - protein, 9 aa, synthetic construct
AQNVLHQIS

SEQ ID NO: 634 - protein, 9 aa, synthetic construct
AQSKKFGQS

SEQ ID NO: 635 - protein, 9 aa, synthetic construct
AQTVYSGIS

SEQ ID NO: 636 - protein, 9 aa, synthetic construct
AQLTTHQFS

SEQ ID NO: 637 - protein, 9 aa, synthetic construct
AQVVCSNVI

SEQ ID NO: 638 - protein, 9 aa, synthetic construct
AQIPQIRSS

SEQ ID NO: 639 - protein, 9 aa, synthetic construct
AQLICSSVR

SEQ ID NO: 640 - protein, 9 aa, synthetic construct
AQTVTRQTT

SEQ ID NO: 641 - protein, 9 aa, synthetic construct
AQVLDNIRW

SEQ ID NO: 642 - protein, 9 aa, synthetic construct
AQYVTMQVQ

SEQ ID NO: 643 - protein, 9 aa, synthetic construct
AQENDIRRY

SEQ ID NO: 644 - protein, 9 aa, synthetic construct
AQTVLTQHS

SEQ ID NO: 645 - protein, 9 aa, synthetic construct
AQTWSTGAS

SEQ ID NO: 646 - protein, 9 aa, synthetic construct
AQLICTTVP

SEQ ID NO: 647 - protein, 9 aa, synthetic construct
AQSQGDVRR

SEQ ID NO: 648 - protein, 9 aa, synthetic construct
AQMNERWHV

SEQ ID NO: 649 - protein, 9 aa, synthetic construct
AQVVTASRS

SEQ ID NO: 650 - protein, 9 aa, synthetic construct
AQVICMGVI

SEQ ID NO: 651 - protein, 9 aa, synthetic construct
AQSPVKLSQ

SEQ ID NO: 652 - protein, 9 aa, synthetic construct
AQLPSGVRH

SEQ ID NO: 653 - protein, 9 aa, synthetic construct
AQDPVKLGR

SEQ ID NO: 654 - protein, 9 aa, synthetic construct
AQQKPKAEF

SEQ ID NO: 655 - protein, 9 aa, synthetic construct
AQTTLSQCS

SEQ ID NO: 656 - protein, 9 aa, synthetic construct
AQGRPPPSS

SEQ ID NO: 657 - protein, 9 aa, synthetic construct
AQSMGRMAS

SEQ ID NO: 658 - protein, 9 aa, synthetic construct
AQGSNGMRF

SEQ ID NO: 659 - protein, 9 aa, synthetic construct
AQGKSLVFT

SEQ ID NO: 660 - protein, 9 aa, synthetic construct
AQNTVMQTS

SEQ ID NO: 661 - protein, 9 aa, synthetic construct
AQGPLREGM

SEQ ID NO: 662 - protein, 9 aa, synthetic construct
AQMPTGMGL

SEQ ID NO: 663 - protein, 9 aa, synthetic construct
AQGVVRQTS

SEQ ID NO: 664 - protein, 9 aa, synthetic construct
AQMINTHKL

SEQ ID NO: 665 - protein, 9 aa, synthetic construct
AQSIGVYGL

SEQ ID NO: 666 - protein, 9 aa, synthetic construct
AQRGKIEHH

SEQ ID NO: 667 - protein, 9 aa, synthetic construct
AQNILRMGN

SEQ ID NO: 668 - protein, 9 aa, synthetic construct
AQVKNRLTN

SEQ ID NO: 669 - protein, 9 aa, synthetic construct
AQQQSPVYM

SEQ ID NO: 670 - protein, 9 aa, synthetic construct
AQYVVSSKQ

SEQ ID NO: 671 - protein, 9 aa, synthetic construct
AQMITRQID

SEQ ID NO: 672 - protein, 9 aa, synthetic construct
AQRTMTSNR

SEQ ID NO: 673 - protein, 9 aa, synthetic construct
AQGPIQAGG

SEQ ID NO: 674 - protein, 9 aa, synthetic construct
AQSVVKLST

SEQ ID NO: 675 - protein, 9 aa, synthetic construct
AQRMTQVGQ

SEQ ID NO: 676 - protein, 9 aa, synthetic construct
AQTPIRESY

SEQ ID NO: 677 - protein, 9 aa, synthetic construct
AQAMVKLGG

SEQ ID NO: 678 - protein, 9 aa, synthetic construct
AQKGRFVPE

SEQ ID NO: 679 - protein, 9 aa, synthetic construct
AQQPGGMVR

SEQ ID NO: 680 - protein, 9 aa, synthetic construct
AQGGHVGNG

SEQ ID NO: 681 - protein, 9 aa, synthetic construct
AQVVCSSLL

SEQ ID NO: 682 - protein, 9 aa, synthetic construct
AQGNYTGRS

SEQ ID NO: 683 - protein, 9 aa, synthetic construct
AQLAMTAHK

SEQ ID NO: 684 - protein, 9 aa, synthetic construct
AQLSPKAGY

SEQ ID NO: 685 - protein, 9 aa, synthetic construct
AQAGMRPNI

SEQ ID NO: 686 - protein, 9 aa, synthetic construct
AQFKMVSSS

SEQ ID NO: 687 - protein, 9 aa, synthetic construct
AQVICTTNR

SEQ ID NO: 688 - protein, 9 aa, synthetic construct
AQKYLPKDC

SEQ ID NO: 689 - protein, 9 aa, synthetic construct
AQNVGVRNV

SEQ ID NO: 690 - protein, 9 aa, synthetic construct
AQLVRSMER

SEQ ID NO: 691 - protein, 9 aa, synthetic construct
AQMMLKMGT

SEQ ID NO: 692 - protein, 9 aa, synthetic construct
AQLHKPAER

SEQ ID NO: 693 - protein, 9 aa, synthetic construct
AQNQTPVKW

SEQ ID NO: 694 - protein, 9 aa, synthetic construct
AQIRNVNST

SEQ ID NO: 695 - protein, 9 aa, synthetic construct
AQRLTDNPR

SEQ ID NO: 696 - protein, 9 aa, synthetic construct
AQISSSVRL

SEQ ID NO: 697 - protein, 9 aa, synthetic construct
AQWRSNSLS

SEQ ID NO: 698 - protein, 9 aa, synthetic construct
AQRQSPVHS

SEQ ID NO: 699 - protein, 9 aa, synthetic construct
AQTVMSQVS

SEQ ID NO: 700 - protein, 9 aa, synthetic construct
AQSPKGIYF

SEQ ID NO: 701 - protein, 9 aa, synthetic construct
AQTLNKQIT

SEQ ID NO: 702 - protein, 9 aa, synthetic construct
AQKNNLRSD

SEQ ID NO: 703 - protein, 9 aa, synthetic construct
AQRVIDLNR

SEQ ID NO: 704 - protein, 9 aa, synthetic construct
AQTNKKFNS

SEQ ID NO: 705 - protein, 9 aa, synthetic construct
AQRVSTGIS

SEQ ID NO: 706 - protein, 9 aa, synthetic construct
AQTVVRQMG

SEQ ID NO: 707 - protein, 9 aa, synthetic construct
AQEGLKGRA

SEQ ID NO: 708 - protein, 9 aa, synthetic construct
AQHMKDRVN

SEQ ID NO: 709 - protein, 9 aa, synthetic construct
AQSPIRGGE

SEQ ID NO: 710 - protein, 9 aa, synthetic construct
AQSLLSQLS

SEQ ID NO: 711 - protein, 9 aa, synthetic construct
AQHFKPNNL

SEQ ID NO: 712 - protein, 9 aa, synthetic construct
AQSMVAGGG

SEQ ID NO: 713 - protein, 9 aa, synthetic construct
AQGPVGMTG

SEQ ID NO: 714 - protein, 9 aa, synthetic construct
AQGVVREGA

SEQ ID NO: 715 - protein, 9 aa, synthetic construct
AQPSPAGRT

SEQ ID NO: 716 - protein, 9 aa, synthetic construct
AQEPKDEWR

SEQ ID NO: 717 - protein, 9 aa, synthetic construct
AQHLTNRTH

SEQ ID NO: 718 - protein, 9 aa, synthetic construct
AQRGSSWGA

SEQ ID NO: 719 - protein, 9 aa, synthetic construct
AQDNRLHYP

SEQ ID NO: 720 - protein, 9 aa, synthetic construct
AQNIGSYSL

SEQ ID NO: 721 - protein, 9 aa, synthetic construct
AQSPIPAGA

SEQ ID NO: 722 - protein, 9 aa, synthetic construct
AQYINGPSM

SEQ ID NO: 723 - protein, 9 aa, synthetic construct
AQRPANLNR

SEQ ID NO: 724 - protein, 9 aa, synthetic construct
AQSAGYSKG

SEQ ID NO: 725 - protein, 9 aa, synthetic construct
AQTIWSGGP

SEQ ID NO: 726 - protein, 9 aa, synthetic construct
AQSHTNSRA

SEQ ID NO: 727 - protein, 9 aa, synthetic construct
AQTSYTGIS

SEQ ID NO: 728 - protein, 9 aa, synthetic construct
AQTLYKYYP

SEQ ID NO: 729 - protein, 9 aa, synthetic construct
AQYGAAWHV

SEQ ID NO: 730 - protein, 9 aa, synthetic construct
AQHMIKLGE

SEQ ID NO: 731 - protein, 9 aa, synthetic construct
AQTFQMQIA

SEQ ID NO: 732 - protein, 9 aa, synthetic construct
AQLVFGRDM

SEQ ID NO: 733 - protein, 9 aa, synthetic construct
AQTLNTHNT

SEQ ID NO: 734 - protein, 9 aa, synthetic construct
AQSMIKLGL

SEQ ID NO: 735 - protein, 9 aa, synthetic construct
AQDRLKMVS

SEQ ID NO: 736 - protein, 9 aa, synthetic construct
AQTVWEGGD

SEQ ID NO: 737 - protein, 9 aa, synthetic construct
AQISKPNRT

SEQ ID NO: 738 - protein, 9 aa, synthetic construct
AQIISYTRA

SEQ ID NO: 739 - protein, 9 aa, synthetic construct
AQMHTSHNT

SEQ ID NO: 740 - protein, 9 aa, synthetic construct
AQIIATHNN

SEQ ID NO: 741 - protein, 9 aa, synthetic construct
AQRLKGEWT

SEQ ID NO: 742 - protein, 9 aa, synthetic construct
AQIKLIVKS

SEQ ID NO: 743 - protein, 9 aa, synthetic construct
AQQVVKMGL

SEQ ID NO: 744 - protein, 9 aa, synthetic construct
AQHMPSPLR

SEQ ID NO: 745 - protein, 9 aa, synthetic construct
AQTIIRFGQ

SEQ ID NO: 746 - protein, 9 aa, synthetic construct
AQSMVPRNS

SEQ ID NO: 747 - protein, 9 aa, synthetic construct
AQNPVKMGA

SEQ ID NO: 748 - protein, 9 aa, synthetic construct
AQSMVGGNP

SEQ ID NO: 749 - protein, 9 aa, synthetic construct
AQAWKDSDL

SEQ ID NO: 750 - protein, 9 aa, synthetic construct
AQVVSGPRT

SEQ ID NO: 751 - protein, 9 aa, synthetic construct
AQTFVKQIT

SEQ ID NO: 752 - protein, 9 aa, synthetic construct
AQTVVKMGT

SEQ ID NO: 753 - protein, 9 aa, synthetic construct
AQIRPDYFY

SEQ ID NO: 754 - protein, 9 aa, synthetic construct
AQREIRTSS

SEQ ID NO: 755 - protein, 9 aa, synthetic construct
AQFQSPVSS

SEQ ID NO: 756 - protein, 9 aa, synthetic construct
AQSVVALGS

SEQ ID NO: 757 - protein, 9 aa, synthetic construct
AQTMAQNKQ

SEQ ID NO: 758 - protein, 9 aa, synthetic construct
AQYKTSKNA

SEQ ID NO: 759 - protein, 9 aa, synthetic construct
AQGSSLLFK

SEQ ID NO: 760 - protein, 9 aa, synthetic construct
AQPFPRTNP

SEQ ID NO: 761 - protein, 9 aa, synthetic construct
AQRESVRLR

SEQ ID NO: 762 - protein, 9 aa, synthetic construct
AQILTKLYT

SEQ ID NO: 763 - protein, 9 aa, synthetic construct
AQIQYKTVG

SEQ ID NO: 764 - protein, 9 aa, synthetic construct
AQFGRMAVS

SEQ ID NO: 765 - protein, 9 aa, synthetic construct
AQTDPHSNF

SEQ ID NO: 766 - protein, 9 aa, synthetic construct
AQDFRTARQ

SEQ ID NO: 767 - protein, 9 aa, synthetic construct
AQKVTGMGI

SEQ ID NO: 768 - protein, 9 aa, synthetic construct
AQTRLYKSP

SEQ ID NO: 769 - protein, 9 aa, synthetic construct
AQRSARPPS

SEQ ID NO: 770 - protein, 9 aa, synthetic construct
AQLVCTYAI

SEQ ID NO: 771 - protein, 9 aa, synthetic construct
AQSHKLGVH

SEQ ID NO: 772 - protein, 9 aa, synthetic construct
AQMRYGGGS

SEQ ID NO: 773 - protein, 9 aa, synthetic construct
AQRDPDRNL

SEQ ID NO: 774 - protein, 9 aa, synthetic construct
AQGGYQLKG

SEQ ID NO: 775 - protein, 9 aa, synthetic construct
AQSHSKTAF

SEQ ID NO: 776 - protein, 9 aa, synthetic construct
AQVGGGMSN

SEQ ID NO: 777 - protein, 9 aa, synthetic construct
AQSKRLSQS

SEQ ID NO: 778 - protein, 9 aa, synthetic construct
AQNPVGGRG

SEQ ID NO: 779 - protein, 9 aa, synthetic construct
AQSGRPTST

SEQ ID NO: 780 - protein, 9 aa, synthetic construct
AQMSAQPRL

SEQ ID NO: 781 - protein, 9 aa, synthetic construct
AQSRNSVYN

SEQ ID NO: 782 - protein, 9 aa, synthetic construct
AQLICSSLK

SEQ ID NO: 783 - protein, 9 aa, synthetic construct
AQTSVKLKV

SEQ ID NO: 784 - protein, 9 aa, synthetic construct
AQTPMSRHV

SEQ ID NO: 785 - protein, 9 aa, synthetic construct
AQRTGYGTG

SEQ ID NO: 786 - protein, 9 aa, synthetic construct
AQVICSTGM

SEQ ID NO: 787 - protein, 9 aa, synthetic construct
AQANSHRSP

SEQ ID NO: 788 - protein, 9 aa, synthetic construct
AQRPEGPHK

SEQ ID NO: 789 - protein, 9 aa, synthetic construct
AQWINSGPS

SEQ ID NO: 790 - protein, 9 aa, synthetic construct
AQNLYTNRS

SEQ ID NO: 791 - protein, 9 aa, synthetic construct
AQCASGKYG

SEQ ID NO: 792 - protein, 9 aa, synthetic construct
AQTVLRQGE

SEQ ID NO: 793 - protein, 9 aa, synthetic construct
AQRDAKLMD

SEQ ID NO: 794 - protein, 9 aa, synthetic construct
AQFHMSLKD

SEQ ID NO: 795 - protein, 9 aa, synthetic construct
AQIICSGRY

SEQ ID NO: 796 - protein, 9 aa, synthetic construct
AQVIVHSPA

SEQ ID NO: 797 - protein, 9 aa, synthetic construct
AQALTQPSR

SEQ ID NO: 798 - protein, 9 aa, synthetic construct
AQTPVKYGS

SEQ ID NO: 799 - protein, 9 aa, synthetic construct
AQRSVGSVY

SEQ ID NO: 800 - protein, 9 aa, synthetic construct
AQLKPKSTA

SEQ ID NO: 801 - protein, 9 aa, synthetic construct
AQTMLKLGD

SEQ ID NO: 802 - protein, 9 aa, synthetic construct
AQFVAAKTQ

SEQ ID NO: 803 - protein, 9 aa, synthetic construct
AQISPLFTK

SEQ ID NO: 804 - protein, 9 aa, synthetic construct
AQTTRSSMC

SEQ ID NO: 805 - protein, 9 aa, synthetic construct
AQTVCSNLK

SEQ ID NO: 806 - protein, 9 aa, synthetic construct
AQSPLRAGA

SEQ ID NO: 807 - protein, 9 aa, synthetic construct
AQQIGGRNL

SEQ ID NO: 808 - protein, 9 aa, synthetic construct
AQSVVYQLT

SEQ ID NO: 809 - protein, 9 aa, synthetic construct
AQVVSESQG

SEQ ID NO: 810 - protein, 9 aa, synthetic construct
AQKYPSVSS

SEQ ID NO: 811 - protein, 9 aa, synthetic construct
AQKTNYSNM

SEQ ID NO: 812 - protein, 9 aa, synthetic construct
AQISPGRYL

SEQ ID NO: 813 - protein, 9 aa, synthetic construct
AQTMLKGGL

SEQ ID NO: 814 - protein, 9 aa, synthetic construct
AQVVCPKNE

SEQ ID NO: 815 - protein, 9 aa, synthetic construct
AQAMARGRV

SEQ ID NO: 816 - protein, 9 aa, synthetic construct
AQTQWSGIS

SEQ ID NO: 817 - protein, 9 aa, synthetic construct
AQVLRSQID

SEQ ID NO: 818 - protein, 9 aa, synthetic construct
AQSRILPVS

SEQ ID NO: 819 - protein, 9 aa, synthetic construct
AQGHTGIHS

SEQ ID NO: 820 - protein, 9 aa, synthetic construct
AQPMPARTH

SEQ ID NO: 821 - protein, 9 aa, synthetic construct
AQMRQAAKD

SEQ ID NO: 822 - protein, 9 aa, synthetic construct
AQQNPVRAL

SEQ ID NO: 823 - protein, 9 aa, synthetic construct
AQRVPQAGR

SEQ ID NO: 824 - protein, 9 aa, synthetic construct
AQSPTRYGE

SEQ ID NO: 825 - protein, 9 aa, synthetic construct
AQMNDIRRH

SEQ ID NO: 826 - protein, 9 aa, synthetic construct
AQNSSGRSG

SEQ ID NO: 827 - protein, 9 aa, synthetic construct
AQKISSHNI

SEQ ID NO: 828 - protein, 9 aa, synthetic construct
AQSMPSPNR

SEQ ID NO: 829 - protein, 9 aa, synthetic construct
AQCSNRMPK

SEQ ID NO: 830 - protein, 9 aa, synthetic construct
AQGSSLRSM

SEQ ID NO: 831 - protein, 9 aa, synthetic construct
AQIGEYRLK

SEQ ID NO: 832 - protein, 9 aa, synthetic construct
AQSMIKMST

SEQ ID NO: 833 - protein, 9 aa, synthetic construct
AQNTLSQLR

SEQ ID NO: 834 - protein, 9 aa, synthetic construct
AQSNPKRAW

SEQ ID NO: 835 - protein, 9 aa, synthetic construct
AQTFPNSVR

SEQ ID NO: 836 - protein, 9 aa, synthetic construct
AQTMHGTNS

SEQ ID NO: 837 - protein, 9 aa, synthetic construct
AQIWRKAIA

SEQ ID NO: 838 - protein, 9 aa, synthetic construct
AQTVGSRSA

SEQ ID NO: 839 - protein, 9 aa, synthetic construct
AQQKMTYYE

SEQ ID NO: 840 - protein, 9 aa, synthetic construct
AQVMTKLGP

SEQ ID NO: 841 - protein, 9 aa, synthetic construct
AQAKHDELV

SEQ ID NO: 842 - protein, 9 aa, synthetic construct
AQRVVKQGE

SEQ ID NO: 843 - protein, 9 aa, synthetic construct
AQKHSLAYT

SEQ ID NO: 844 - protein, 9 aa, synthetic construct
AQLNDATRY

SEQ ID NO: 845 - protein, 9 aa, synthetic construct
AQISGVRFA

SEQ ID NO: 846 - protein, 9 aa, synthetic construct
AQVICANQR

SEQ ID NO: 847 - protein, 9 aa, synthetic construct
AQVLSVKDR

SEQ ID NO: 848 - protein, 9 aa, synthetic construct
AQFLKEYNT

SEQ ID NO: 849 - protein, 9 aa, synthetic construct
AQKGSFVSA

SEQ ID NO: 850 - protein, 9 aa, synthetic construct
AQSFDPNGS

SEQ ID NO: 851 - protein, 9 aa, synthetic construct
AQHSVRRDP

SEQ ID NO: 852 - protein, 9 aa, synthetic construct
AQSVTQQVT

SEQ ID NO: 853 - protein, 9 aa, synthetic construct
AQSPIKLSH

SEQ ID NO: 854 - protein, 9 aa, synthetic construct
AQTVVKHGL

SEQ ID NO: 855 - protein, 9 aa, synthetic construct
AQKFVRSPV

SEQ ID NO: 856 - protein, 9 aa, synthetic construct
AQYSPVVEK

SEQ ID NO: 857 - protein, 9 aa, synthetic construct
AQMRGNLNV

SEQ ID NO: 858 - protein, 9 aa, synthetic construct
AQSMVPKLS

SEQ ID NO: 859 - protein, 9 aa, synthetic construct
AQSAQRASA

SEQ ID NO: 860 - protein, 9 aa, synthetic construct
AQFVDPNQR

SEQ ID NO: 861 - protein, 9 aa, synthetic construct
AQTALSQHS

SEQ ID NO: 862 - protein, 9 aa, synthetic construct
AQNAFNKQR

SEQ ID NO: 863 - protein, 9 aa, synthetic construct
AQESPGRIT

SEQ ID NO: 864 - protein, 9 aa, synthetic construct
AQLRIPGPR

SEQ ID NO: 865 - protein, 9 aa, synthetic construct
AQRSSLSSL

SEQ ID NO: 866 - protein, 9 aa, synthetic construct
AQNAANSYK

SEQ ID NO: 867 - protein, 9 aa, synthetic construct
AQSRAEWKD

SEQ ID NO: 868 - protein, 9 aa, synthetic construct
AQTQGKLHP

SEQ ID NO: 869 - protein, 9 aa, synthetic construct
AQMQTIGSY

SEQ ID NO: 870 - protein, 9 aa, synthetic construct
AQAPGLRYN

SEQ ID NO: 871 - protein, 9 aa, synthetic construct
AQRPSDRMS

SEQ ID NO: 872 - protein, 9 aa, synthetic construct
AQMTRTSAS

SEQ ID NO: 873 - protein, 9 aa, synthetic construct
AQTILKLGS

SEQ ID NO: 874 - protein, 9 aa, synthetic construct
AQVVEGHWM

SEQ ID NO: 875 - protein, 9 aa, synthetic construct
AQEVVMRTS

SEQ ID NO: 876 - protein, 9 aa, synthetic construct
AQVRPSQIR

SEQ ID NO: 877 - protein, 9 aa, synthetic construct
AQWVVSLDR

SEQ ID NO: 878 - protein, 9 aa, synthetic construct
AQLNRENRF

SEQ ID NO: 879 - protein, 9 aa, synthetic construct
AQIARIAVQ

SEQ ID NO: 880 - protein, 9 aa, synthetic construct
AQFRTGKEL

SEQ ID NO: 881 - protein, 9 aa, synthetic construct
AQDVVRQGY

SEQ ID NO: 882 - protein, 9 aa, synthetic construct
AQSTLNQVS

SEQ ID NO: 883 - protein, 9 aa, synthetic construct
AQVGRLGLA

SEQ ID NO: 884 - protein, 9 aa, synthetic construct
AQWRPTAGG

SEQ ID NO: 885 - protein, 9 aa, synthetic construct
AQYSRSPSS

SEQ ID NO: 886 - protein, 9 aa, synthetic construct
AQNKRALMP

SEQ ID NO: 887 - protein, 9 aa, synthetic construct
AQYSRNPAG

SEQ ID NO: 888 - protein, 9 aa, synthetic construct
AQTFPSSRA

SEQ ID NO: 889 - protein, 9 aa, synthetic construct
AQQVLSQVA

SEQ ID NO: 890 - protein, 9 aa, synthetic construct
AQMKYTTAL

SEQ ID NO: 891 - protein, 9 aa, synthetic construct
AQLKTAERA

SEQ ID NO: 892 - protein, 9 aa, synthetic construct
AQVTSMHPG

SEQ ID NO: 893 - protein, 9 aa, synthetic construct
AQMLRPNRS

SEQ ID NO: 894 - protein, 9 aa, synthetic construct
AQVLNKGNH

SEQ ID NO: 895 - protein, 9 aa, synthetic construct
AQGRKAYEH

SEQ ID NO: 896 - protein, 9 aa, synthetic construct
AQCSSVCTL

SEQ ID NO: 897 - protein, 9 aa, synthetic construct
AQNMTKMSA

SEQ ID NO: 898 - protein, 9 aa, synthetic construct
AQLSPYEGD

SEQ ID NO: 899 - protein, 9 aa, synthetic construct
AQTKYHLDL

SEQ ID NO: 900 - protein, 9 aa, synthetic construct
AQYLCRGAL

SEQ ID NO: 901 - protein, 9 aa, synthetic construct
AQSKHPAVY

SEQ ID NO: 902 - protein, 9 aa, synthetic construct
AQSPSARPR

SEQ ID NO: 903 - protein, 9 aa, synthetic construct
AQSQWAGPT

SEQ ID NO: 904 - protein, 9 aa, synthetic construct
AQATRIPHL

SEQ ID NO: 905 - protein, 9 aa, synthetic construct
AQVMNCCQH

SEQ ID NO: 906 - protein, 9 aa, synthetic construct
AQKPGMLKV

SEQ ID NO: 907 - protein, 9 aa, synthetic construct
AQVVFSQTS

SEQ ID NO: 908 - protein, 9 aa, synthetic construct
AQNQTFKST

SEQ ID NO: 909 - protein, 9 aa, synthetic construct
AQIVCGGLK

SEQ ID NO: 910 - protein, 9 aa, synthetic construct
AQTVWQGGT

SEQ ID NO: 911 - protein, 9 aa, synthetic construct
AQAKGMVSL

SEQ ID NO: 912 - protein, 9 aa, synthetic construct
AQVTINQYG

SEQ ID NO: 913 - protein, 9 aa, synthetic construct
AQNCGNNMW

SEQ ID NO: 914 - protein, 9 aa, synthetic construct
AQDVRRLGI

SEQ ID NO: 915 - protein, 9 aa, synthetic construct
AQILGKPDR

SEQ ID NO: 916 - protein, 9 aa, synthetic construct
AQLQYEAME

SEQ ID NO: 917 - protein, 9 aa, synthetic construct
AQRLSAQAQ

SEQ ID NO: 918 - protein, 9 aa, synthetic construct
AQLSAGGLR

SEQ ID NO: 919 - protein, 9 aa, synthetic construct
AQLHEKRLL

SEQ ID NO: 920 - protein, 9 aa, synthetic construct
AQDASLVWK

SEQ ID NO: 921 - protein, 9 aa, synthetic construct
AQQTPVARM

SEQ ID NO: 922 - protein, 9 aa, synthetic construct
AQTMVGNGM

SEQ ID NO: 923 - protein, 9 aa, synthetic construct
AQSIIAMGL

SEQ ID NO: 924 - protein, 9 aa, synthetic construct
AQNARPVIK

SEQ ID NO: 925 - protein, 9 aa, synthetic construct
AQSVVSRGM

SEQ ID NO: 926 - protein, 9 aa, synthetic construct
AQTIMNQFA

SEQ ID NO: 927 - protein, 9 aa, synthetic construct
AQRADNGIY

SEQ ID NO: 928 - protein, 9 aa, synthetic construct
AQSQRAQTG

SEQ ID NO: 929 - protein, 9 aa, synthetic construct
AQSPKVNKT

SEQ ID NO: 930 - protein, 9 aa, synthetic construct
AQIYALSSG

SEQ ID NO: 931 - protein, 9 aa, synthetic construct
AQLLCSDLV

SEQ ID NO: 932 - protein, 9 aa, synthetic construct
AQWRSERNP

SEQ ID NO: 933 - protein, 9 aa, synthetic construct
AQQHGIKGC

SEQ ID NO: 934 - protein, 9 aa, synthetic construct
AQGHFVVFK

SEQ ID NO: 935 - protein, 9 aa, synthetic construct
AQDNRIYRV

SEQ ID NO: 936 - protein, 9 aa, synthetic construct
AQNMVGSGF

SEQ ID NO: 937 - protein, 9 aa, synthetic construct
AQTKWHGDE

SEQ ID NO: 938 - protein, 9 aa, synthetic construct
AQCDMSNMD

SEQ ID NO: 939 - protein, 9 aa, synthetic construct
AQRPVRSEL

SEQ ID NO: 940 - protein, 9 aa, synthetic construct
AQRVKDYAE

SEQ ID NO: 941 - protein, 9 aa, synthetic construct
AQVICDQRN

SEQ ID NO: 942 - protein, 9 aa, synthetic construct
AQSVIGYGT

SEQ ID NO: 943 - protein, 9 aa, synthetic construct
AQSTPRSHG

SEQ ID NO: 944 - protein, 9 aa, synthetic construct
AQANHHAIP

SEQ ID NO: 945 - protein, 9 aa, synthetic construct
AQRPHVGIG

SEQ ID NO: 946 - protein, 9 aa, synthetic construct
AQPNGPSAR

SEQ ID NO: 947 - protein, 9 aa, synthetic construct
AQVHLRTEV

SEQ ID NO: 948 - protein, 9 aa, synthetic construct
AQYLNGPVL

SEQ ID NO: 949 - protein, 9 aa, synthetic construct
AQTATMQMS

SEQ ID NO: 950 - protein, 9 aa, synthetic construct
AQDHLLPHP

SEQ ID NO: 951 - protein, 9 aa, synthetic construct
AQLVESHLK

SEQ ID NO: 952 - protein, 9 aa, synthetic construct
AQHTSFRLA

SEQ ID NO: 953 - protein, 9 aa, synthetic construct
AQNYGANPV

SEQ ID NO: 954 - protein, 9 aa, synthetic construct
AQDMLRLGM

SEQ ID NO: 955 - protein, 9 aa, synthetic construct
AQGIIRLGA

SEQ ID NO: 956 - protein, 9 aa, synthetic construct
AQGNNKTRP

SEQ ID NO: 957 - protein, 9 aa, synthetic construct
AQVNTTKRI

SEQ ID NO: 958 - protein, 9 aa, synthetic construct
AQSINYQVT

SEQ ID NO: 959 - protein, 9 aa, synthetic construct
AQIVCLGRV

SEQ ID NO: 960 - protein, 9 aa, synthetic construct
AQEARIRMC

SEQ ID NO: 961 - protein, 9 aa, synthetic construct
AQVPTSPSN

SEQ ID NO: 962 - protein, 9 aa, synthetic construct
AQAHQDQLC

SEQ ID NO: 963 - protein, 9 aa, synthetic construct
AQKMVGYGE

SEQ ID NO: 964 - protein, 9 aa, synthetic construct
AQGACYGAW

SEQ ID NO: 965 - protein, 9 aa, synthetic construct
AQWKSPAAG

SEQ ID NO: 966 - protein, 9 aa, synthetic construct
AQLTGRNKP

SEQ ID NO: 967 - protein, 9 aa, synthetic construct
AQRQINIEK

SEQ ID NO: 968 - protein, 9 aa, synthetic construct
AQEYTRSKV

SEQ ID NO: 969 - protein, 9 aa, synthetic construct
AQTVVRNGT

SEQ ID NO: 970 - protein, 9 aa, synthetic construct
AQNSSITYL

SEQ ID NO: 971 - protein, 9 aa, synthetic construct
AQNPVKMSQ

SEQ ID NO: 972 - protein, 9 aa, synthetic construct
AQLIGRYEL

SEQ ID NO: 973 - protein, 9 aa, synthetic construct
AQGYTSSAK

SEQ ID NO: 974 - protein, 9 aa, synthetic construct
AQYVTNQTS

SEQ ID NO: 975 - protein, 9 aa, synthetic construct
AQNAQSANH

SEQ ID NO: 976 - protein, 9 aa, synthetic construct
AQSAMYRTP

SEQ ID NO: 977 - protein, 9 aa, synthetic construct
AQGPVRVNG

SEQ ID NO: 978 - protein, 9 aa, synthetic construct
AQRVLTQVS

SEQ ID NO: 979 - protein, 9 aa, synthetic construct
AQVICGLPK

SEQ ID NO: 980 - protein, 9 aa, synthetic construct
AQLITGRLL

SEQ ID NO: 981 - protein, 9 aa, synthetic construct
AQMGQPAMR

SEQ ID NO: 982 - protein, 9 aa, synthetic construct
AQMSSLSYK

SEQ ID NO: 983 - protein, 9 aa, synthetic construct
AQGLNPMCW

SEQ ID NO: 984 - protein, 9 aa, synthetic construct
AQNTMVYAR

SEQ ID NO: 985 - protein, 9 aa, synthetic construct
AQARVIDTR

SEQ ID NO: 986 - protein, 9 aa, synthetic construct
AQNGTRMSA

SEQ ID NO: 987 - protein, 9 aa, synthetic construct
AQNANRRDV

SEQ ID NO: 988 - protein, 9 aa, synthetic construct
AQRFYPMKP

SEQ ID NO: 989 - protein, 9 aa, synthetic construct
AQTFGTYSV

SEQ ID NO: 990 - protein, 9 aa, synthetic construct
AQNVLQLGK

SEQ ID NO: 991 - protein, 9 aa, synthetic construct
AQKQSNHLI

SEQ ID NO: 992 - protein, 9 aa, synthetic construct
AQTLNFQSS

SEQ ID NO: 993 - protein, 9 aa, synthetic construct
AQTTYNQMD

SEQ ID NO: 994 - protein, 9 aa, synthetic construct
AQKWVKPGM

SEQ ID NO: 995 - protein, 9 aa, synthetic construct
AQKTGEWCK

SEQ ID NO: 996 - protein, 9 aa, synthetic construct
AQSRLTLKD

SEQ ID NO: 997 - protein, 9 aa, synthetic construct
AQTISTHNT

SEQ ID NO: 998 - protein, 9 aa, synthetic construct
AQSMTPSGS

SEQ ID NO: 999 - protein, 9 aa, synthetic construct
AQTSTQRHS

SEQ ID NO: 1000 - protein, 9 aa, synthetic construct
AQSFKNPLV

SEQ ID NO: 1001 - protein, 9 aa, synthetic construct
AQVICASFI

SEQ ID NO: 1002 - protein, 9 aa, synthetic construct
AQWSRMPTC

SEQ ID NO: 1003 - protein, 9 aa, synthetic construct
AQSASRHRM

SEQ ID NO: 1004 - protein, 9 aa, synthetic construct
AQRLPTSTA

SEQ ID NO: 1005 - protein, 9 aa, synthetic construct
AQTIHYQIS

SEQ ID NO: 1006 - protein, 9 aa, synthetic construct
AQSMVGPGN

SEQ ID NO: 1007 - protein, 9 aa, synthetic construct
AQNQNPVRT

SEQ ID NO: 1008 - protein, 9 aa, synthetic construct
AQSVLLQFS

SEQ ID NO: 1009 - protein, 9 aa, synthetic construct
AQKLGHIVA

SEQ ID NO: 1010 - protein, 9 aa, synthetic construct
AQSVRVSYN

SEQ ID NO: 1011 - protein, 9 aa, synthetic construct
AQYAVSQRS

SEQ ID NO: 1012 - protein, 9 aa, synthetic construct
AQFINSSGL

SEQ ID NO: 1013 - protein, 9 aa, synthetic construct
AQRVTQSGE

SEQ ID NO: 1014 - protein, 9 aa, synthetic construct
AQKGPYTHN

SEQ ID NO: 1015 - protein, 9 aa, synthetic construct
AQVTMHSVK

SEQ ID NO: 1016 - protein, 9 aa, synthetic construct
AQNVTHQSS

SEQ ID NO: 1017 - protein, 9 aa, synthetic construct
AQFPLKVHG

SEQ ID NO: 1018 - protein, 9 aa, synthetic construct
AQAGLSMRG

SEQ ID NO: 1019 - protein, 9 aa, synthetic construct
AQFHCSMHP

SEQ ID NO: 1020 - protein, 9 aa, synthetic construct
AQTFLHQIE

SEQ ID NO: 1021 - protein, 9 aa, synthetic construct
AQSSSLPYL

SEQ ID NO: 1022 - protein, 9 aa, synthetic construct
AQDRLQTRS

SEQ ID NO: 1023 - protein, 9 aa, synthetic construct
AQFAGVTRP

SEQ ID NO: 1024 - protein, 9 aa, synthetic construct
AQSNSRYCG

SEQ ID NO: 1025 - protein, 9 aa, synthetic construct
AQRMREKLS

SEQ ID NO: 1026 - protein, 9 aa, synthetic construct
AQKWHTSNC

SEQ ID NO: 1027 - protein, 9 aa, synthetic construct
AQHFPLMVD

SEQ ID NO: 1028 - protein, 9 aa, synthetic construct
AQRGNIDQG

SEQ ID NO: 1029 - protein, 9 aa, synthetic construct
AQGPGFFRR

SEQ ID NO: 1030 - protein, 9 aa, synthetic construct
AQIQHLSNV

SEQ ID NO: 1031 - protein, 9 aa, synthetic construct
AQTHMAKAN

SEQ ID NO: 1032 - protein, 9 aa, synthetic construct
AQDGPFLSP

SEQ ID NO: 1033 - protein, 9 aa, synthetic construct
AQLTNVPLR

SEQ ID NO: 1034 - protein, 9 aa, synthetic construct
AQTGYEYDS

SEQ ID NO: 1035 - protein, 9 aa, synthetic construct
AQSPIARGE

SEQ ID NO: 1036 - protein, 9 aa, synthetic construct
AQSPLRTGA

SEQ ID NO: 1037 - protein, 9 aa, synthetic construct
AQVICTTFV

SEQ ID NO: 1038 - protein, 9 aa, synthetic construct
AQAKHSLQS

SEQ ID NO: 1039 - protein, 9 aa, synthetic construct
AQVTYNPIW

SEQ ID NO: 1040 - protein, 9 aa, synthetic construct
AQWINGPPS

SEQ ID NO: 1041 - protein, 9 aa, synthetic construct
AQSVVRSGG

SEQ ID NO: 1042 - protein, 9 aa, synthetic construct
AQNRDINQS

SEQ ID NO: 1043 - protein, 9 aa, synthetic construct
AQGVIALQT

SEQ ID NO: 1044 - protein, 9 aa, synthetic construct
AQLLGMTKG

SEQ ID NO: 1045 - protein, 9 aa, synthetic construct
AQVICDSRV

SEQ ID NO: 1046 - protein, 9 aa, synthetic construct
AQLYIQTEK

SEQ ID NO: 1047 - protein, 9 aa, synthetic construct
AQGVVALLS

SEQ ID NO: 1048 - protein, 9 aa, synthetic construct
AQTVLNQND

SEQ ID NO: 1049 - protein, 9 aa, synthetic construct
AQVICSNMS

SEQ ID NO: 1050 - protein, 9 aa, synthetic construct
AQSMTQYGL

SEQ ID NO: 1051 - protein, 9 aa, synthetic construct
AQQSPVGSR

SEQ ID NO: 1052 - protein, 9 aa, synthetic construct
AQLHLGLLN

SEQ ID NO: 1053 - protein, 9 aa, synthetic construct
AQAPTKLGS

SEQ ID NO: 1054 - protein, 9 aa, synthetic construct
AQNPIQIGN

SEQ ID NO: 1055 - protein, 9 aa, synthetic construct
AQTARLQVD

SEQ ID NO: 1056 - protein, 9 aa, synthetic construct
AQGNWTKAS

SEQ ID NO: 1057 - protein, 9 aa, synthetic construct
AQVTCSYMK

SEQ ID NO: 1058 - protein, 9 aa, synthetic construct
AQVLTSHNT

SEQ ID NO: 1059 - protein, 9 aa, synthetic construct
AQHVVKMSG

SEQ ID NO: 1060 - protein, 9 aa, synthetic construct
AQHEPAYNF

SEQ ID NO: 1061 - protein, 9 aa, synthetic construct
AQLSRLPHM

SEQ ID NO: 1062 - protein, 9 aa, synthetic construct
AQSPIGQGR

SEQ ID NO: 1063 - protein, 9 aa, synthetic construct
AQSPVGTAS

SEQ ID NO: 1064 - protein, 9 aa, synthetic construct
AQLNTKFDS

SEQ ID NO: 1065 - protein, 9 aa, synthetic construct
AQTPVKLSH

SEQ ID NO: 1066 - protein, 9 aa, synthetic construct
AQTSAFVES

SEQ ID NO: 1067 - protein, 9 aa, synthetic construct
AQAIPSHVR

SEQ ID NO: 1068 - protein, 9 aa, synthetic construct
AQTQRLGIA

SEQ ID NO: 1069 - protein, 9 aa, synthetic construct
AQTVIAFGD

SEQ ID NO: 1070 - protein, 9 aa, synthetic construct
AQGPVRLAG

SEQ ID NO: 1071 - protein, 9 aa, synthetic construct
AQVVCSATR

SEQ ID NO: 1072 - protein, 9 aa, synthetic construct
AQSMTPNGG

SEQ ID NO: 1073 - protein, 9 aa, synthetic construct
AQSQNPVQF

SEQ ID NO: 1074 - protein, 9 aa, synthetic construct
AQNNSLAYT

SEQ ID NO: 1075 - protein, 9 aa, synthetic construct
AQTVNVQIH

SEQ ID NO: 1076 - protein, 9 aa, synthetic construct
AQTLQIQVT

SEQ ID NO: 1077 - protein, 9 aa, synthetic construct
AQYLNSSGS

SEQ ID NO: 1078 - protein, 9 aa, synthetic construct
AQITTSQLT

SEQ ID NO: 1079 - protein, 9 aa, synthetic construct
AQYMTHQVN

SEQ ID NO: 1080 - protein, 9 aa, synthetic construct
AQAMVKAGA

SEQ ID NO: 1081 - protein, 9 aa, synthetic construct
AQGRLMRLL

SEQ ID NO: 1082 - protein, 9 aa, synthetic construct
AQKLTPKNW

SEQ ID NO: 1083 - protein, 9 aa, synthetic construct
AQQMYEREF

SEQ ID NO: 1084 - protein, 9 aa, synthetic construct
AQNKGGSSS

SEQ ID NO: 1085 - protein, 9 aa, synthetic construct
AQLRSFEES

SEQ ID NO: 1086 - protein, 9 aa, synthetic construct
AQWYGAQVD

SEQ ID NO: 1087 - protein, 9 aa, synthetic construct
AQYMNSSGS

SEQ ID NO: 1088 - protein, 9 aa, synthetic construct
AQNDMRCVV

SEQ ID NO: 1089 - protein, 9 aa, synthetic construct
AQVMQKTTA

SEQ ID NO: 1090 - protein, 9 aa, synthetic construct
AQKMDTRYP

SEQ ID NO: 1091 - protein, 9 aa, synthetic construct
AQKWDKLSS

SEQ ID NO: 1092 - protein, 9 aa, synthetic construct
AQKYDPFDD

SEQ ID NO: 1093 - protein, 9 aa, synthetic construct
AQGDFSPAG

SEQ ID NO: 1094 - protein, 9 aa, synthetic construct
AQYVKYVEN

SEQ ID NO: 1095 - protein, 9 aa, synthetic construct
AQGVVASMG

SEQ ID NO: 1096 - protein, 9 aa, synthetic construct
AQQDPVRLK

SEQ ID NO: 1097 - protein, 9 aa, synthetic construct
AQVEPRHKW

SEQ ID NO: 1098 - protein, 9 aa, synthetic construct
AQTYWYAPL

SEQ ID NO: 1099 - protein, 9 aa, synthetic construct
AQLICTHLI

SEQ ID NO: 1100 - protein, 9 aa, synthetic construct
AQKGVMLYK

SEQ ID NO: 1101 - protein, 9 aa, synthetic construct
AQTICSSLI

SEQ ID NO: 1102 - protein, 9 aa, synthetic construct
AQRIGEYSV

SEQ ID NO: 1103 - protein, 9 aa, synthetic construct
AQGVVKSGG

SEQ ID NO: 1104 - protein, 9 aa, synthetic construct
AQISYGREF

SEQ ID NO: 1105 - protein, 9 aa, synthetic construct
AQSWVSTSS

SEQ ID NO: 1106 - protein, 9 aa, synthetic construct
AQVVCSGGR

SEQ ID NO: 1107 - protein, 9 aa, synthetic construct
AQQMTQGGS

SEQ ID NO: 1108 - protein, 9 aa, synthetic construct
AQSPVGIGS

SEQ ID NO: 1109 - protein, 9 aa, synthetic construct
AQHRGMASL

SEQ ID NO: 1110 - protein, 9 aa, synthetic construct
AQFKMPVDN

SEQ ID NO: 1111 - protein, 9 aa, synthetic construct
AQLSSLSFK

SEQ ID NO: 1112 - protein, 9 aa, synthetic construct
AQKASGTHP

SEQ ID NO: 1113 - protein, 9 aa, synthetic construct
AQSTTYQMN

SEQ ID NO: 1114 - protein, 9 aa, synthetic construct
AQEFGLSGC

SEQ ID NO: 1115 - protein, 9 aa, synthetic construct
AQHIKNHAC

SEQ ID NO: 1116 - protein, 9 aa, synthetic construct
AQNPVGARV

SEQ ID NO: 1117 - protein, 9 aa, synthetic construct
AQVRTLRGG

SEQ ID NO: 1118 - protein, 9 aa, synthetic construct
AQVVCSSWN

SEQ ID NO: 1119 - protein, 9 aa, synthetic construct
AQSPMLCDK

SEQ ID NO: 1120 - protein, 9 aa, synthetic construct
AQLCRASTR

SEQ ID NO: 1121 - protein, 9 aa, synthetic construct
AQSTALSRK

SEQ ID NO: 1122 - protein, 9 aa, synthetic construct
AQYVPNNKD

SEQ ID NO: 1123 - protein, 9 aa, synthetic construct
AQRIHSSGL

SEQ ID NO: 1124 - protein, 9 aa, synthetic construct
AQGVVALSS

SEQ ID NO: 1125 - protein, 9 aa, synthetic construct
AQGIIRMDT

SEQ ID NO: 1126 - protein, 9 aa, synthetic construct
AQAVVRAQG

SEQ ID NO: 1127 - protein, 9 aa, synthetic construct
AQSPIRING

SEQ ID NO: 1128 - protein, 9 aa, synthetic construct
AQTATWQIS

SEQ ID NO: 1129 - protein, 9 aa, synthetic construct
AQHVIQMLG

SEQ ID NO: 1130 - protein, 9 aa, synthetic construct
AQIVCAGVI

SEQ ID NO: 1131 - protein, 9 aa, synthetic construct
AQYINSNAN

SEQ ID NO: 1132 - protein, 9 aa, synthetic construct
AQGVVQDQG

SEQ ID NO: 1133 - protein, 9 aa, synthetic construct
AQTDRADGV

SEQ ID NO: 1134 - protein, 9 aa, synthetic construct
AQVATAQLN

SEQ ID NO: 1135 - protein, 9 aa, synthetic construct
AQTLVCLTN

SEQ ID NO: 1136 - protein, 9 aa, synthetic construct
AQMHRESGR

SEQ ID NO: 1137 - protein, 9 aa, synthetic construct
AQGVQVGRL

SEQ ID NO: 1138 - protein, 9 aa, synthetic construct
AQMSRPVFG

SEQ ID NO: 1139 - protein, 9 aa, synthetic construct
AQTMLRSGA

SEQ ID NO: 1140 - protein, 9 aa, synthetic construct
AQVPNAFSK

SEQ ID NO: 1141 - protein, 9 aa, synthetic construct
AQSVSSGIS

SEQ ID NO: 1142 - protein, 9 aa, synthetic construct
AQWKLYAGD

SEQ ID NO: 1143 - protein, 9 aa, synthetic construct
AQTASFQTS

SEQ ID NO: 1144 - protein, 9 aa, synthetic construct
AQIETMDLD

SEQ ID NO: 1145 - protein, 9 aa, synthetic construct
AQSTCDTSR

SEQ ID NO: 1146 - protein, 9 aa, synthetic construct
AQVLCTSVR

SEQ ID NO: 1147 - protein, 9 aa, synthetic construct
AQVFATHNV

SEQ ID NO: 1148 - protein, 9 aa, synthetic construct
AQTIFDGKK

SEQ ID NO: 1149 - protein, 9 aa, synthetic construct
AQSSRVSSP

SEQ ID NO: 1150 - protein, 9 aa, synthetic construct
AQPVTDKGR

SEQ ID NO: 1151 - protein, 9 aa, synthetic construct
AQMRSVDRN

SEQ ID NO: 1152 - protein, 9 aa, synthetic construct
AQLVCAYVM

SEQ ID NO: 1153 - protein, 9 aa, synthetic construct
AQLLLRWVR

SEQ ID NO: 1154 - protein, 9 aa, synthetic construct
AQTVKMCSG

SEQ ID NO: 1155 - protein, 9 aa, synthetic construct
AQVICAGKP

SEQ ID NO: 1156 - protein, 9 aa, synthetic construct
AQIVAGRSL

SEQ ID NO: 1157 - protein, 9 aa, synthetic construct
AQTVFQMGS

SEQ ID NO: 1158 - protein, 9 aa, synthetic construct
AQEVVKMGR

SEQ ID NO: 1159 - protein, 9 aa, synthetic construct
AQTVVQNGA

SEQ ID NO: 1160 - protein, 9 aa, synthetic construct
AQIVCSSLL

SEQ ID NO: 1161 - protein, 9 aa, synthetic construct
AQMVVRSGE

SEQ ID NO: 1162 - protein, 9 aa, synthetic construct
AQGIVRLGE

SEQ ID NO: 1163 - protein, 9 aa, synthetic construct
AQGMSLLSK

SEQ ID NO: 1164 - protein, 9 aa, synthetic construct
AQSPTKYGL

SEQ ID NO: 1165 - protein, 9 aa, synthetic construct
AQTMTKRGE

SEQ ID NO: 1166 - protein, 9 aa, synthetic construct
AQVVCGLVV

SEQ ID NO: 1167 - protein, 9 aa, synthetic construct
AQYMMRLKM

SEQ ID NO: 1168 - protein, 9 aa, synthetic construct
AQQGDNQLM

SEQ ID NO: 1169 - protein, 9 aa, synthetic construct
AQTLKSNRD

SEQ ID NO: 1170 - protein, 9 aa, synthetic construct
AQNSYKSNP

SEQ ID NO: 1171 - protein, 9 aa, synthetic construct
AQYARGGSL

SEQ ID NO: 1172 - protein, 9 aa, synthetic construct
AQAMTGMGA

SEQ ID NO: 1173 - protein, 9 aa, synthetic construct
AQRSDLHHC

SEQ ID NO: 1174 - protein, 9 aa, synthetic construct
AQSPYGLGN

SEQ ID NO: 1175 - protein, 9 aa, synthetic construct
AQRQSDCGG

SEQ ID NO: 1176 - protein, 9 aa, synthetic construct
AQCMSICSA

SEQ ID NO: 1177 - protein, 9 aa, synthetic construct
AQGVTQMSH

SEQ ID NO: 1178 - protein, 9 aa, synthetic construct
AQVVTLDRC

SEQ ID NO: 1179 - protein, 9 aa, synthetic construct
AQNSRGPMN

SEQ ID NO: 1180 - protein, 9 aa, synthetic construct
AQGALSIRV

SEQ ID NO: 1181 - protein, 9 aa, synthetic construct
AQTLSTGIY

SEQ ID NO: 1182 - protein, 9 aa, synthetic construct
AQLICSALQ

SEQ ID NO: 1183 - protein, 9 aa, synthetic construct
AQPHMHVCI

SEQ ID NO: 1184 - protein, 9 aa, synthetic construct
AQHPGACSH

SEQ ID NO: 1185 - protein, 9 aa, synthetic construct
AQCGSRLML

SEQ ID NO: 1186 - protein, 9 aa, synthetic construct
AQVVEAHTR

SEQ ID NO: 1187 - protein, 9 aa, synthetic construct
AQMSNLVVS

SEQ ID NO: 1188 - protein, 9 aa, synthetic construct
AQVGAISNA

SEQ ID NO: 1189 - protein, 9 aa, synthetic construct
AQYRWLDPR

SEQ ID NO: 1190 - protein, 9 aa, synthetic construct
AQSPFAMGT

SEQ ID NO: 1191 - protein, 9 aa, synthetic construct
AQKSGLDKF

SEQ ID NO: 1192 - protein, 9 aa, synthetic construct
AQQNPVAAR

SEQ ID NO: 1193 - protein, 9 aa, synthetic construct
AQTIMVQMT

SEQ ID NO: 1194 - protein, 9 aa, synthetic construct
AQRYMNGRL

SEQ ID NO: 1195 - protein, 9 aa, synthetic construct
AQRKHGMAW

SEQ ID NO: 1196 - protein, 9 aa, synthetic construct
AQFNKIDSP

SEQ ID NO: 1197 - protein, 9 aa, synthetic construct
AQVHVRGSQ

SEQ ID NO: 1198 - protein, 9 aa, synthetic construct
AQLYVNTER

SEQ ID NO: 1199 - protein, 9 aa, synthetic construct
AQSSCVNTR

SEQ ID NO: 1200 - protein, 9 aa, synthetic construct
AQKAGVMKA

SEQ ID NO: 1201 - protein, 9 aa, synthetic construct
AQQMIRLSE

SEQ ID NO: 1202 - protein, 9 aa, synthetic construct
AQSVLSHNI

SEQ ID NO: 1203 - protein, 9 aa, synthetic construct
AQRLDHHTY

SEQ ID NO: 1204 - protein, 9 aa, synthetic construct
AQHDDTFMS

SEQ ID NO: 1205 - protein, 9 aa, synthetic construct
AQYVNSDGS

SEQ ID NO: 1206 - protein, 9 aa, synthetic construct
AQKWLNLEV

SEQ ID NO: 1207 - protein, 9 aa, synthetic construct
AQTVVKMVT

SEQ ID NO: 1208 - protein, 9 aa, synthetic construct
AQSSAKCIK

SEQ ID NO: 1209 - protein, 9 aa, synthetic construct
AQTAMSVDS

SEQ ID NO: 1210 - protein, 9 aa, synthetic construct
AQGVIKMGQ

SEQ ID NO: 1211 - protein, 9 aa, synthetic construct
AQSMLGLGR

SEQ ID NO: 1212 - protein, 9 aa, synthetic construct
AQSPVKSGH

SEQ ID NO: 1213 - protein, 9 aa, synthetic construct
AQFSTMKHL

SEQ ID NO: 1214 - protein, 9 aa, synthetic construct
AQVKFIEPY

SEQ ID NO: 1215 - protein, 9 aa, synthetic construct
AQVSCPEML

SEQ ID NO: 1216 - protein, 9 aa, synthetic construct
AQVICMGLL

SEQ ID NO: 1217 - protein, 9 aa, synthetic construct
AQAPIKLGE

SEQ ID NO: 1218 - protein, 9 aa, synthetic construct
AQGFDPNKK

SEQ ID NO: 1219 - protein, 9 aa, synthetic construct
AQEVYNPIW

SEQ ID NO: 1220 - protein, 9 aa, synthetic construct
AQTYADQTD

SEQ ID NO: 1221 - protein, 9 aa, synthetic construct
AQTIGAYMV

SEQ ID NO: 1222 - protein, 9 aa, synthetic construct
AQEHTIDCV

SEQ ID NO: 1223 - protein, 9 aa, synthetic construct
AQEVTRQLS

SEQ ID NO: 1224 - protein, 9 aa, synthetic construct
AQVRRFLLW

SEQ ID NO: 1225 - protein, 9 aa, synthetic construct
AQFLGQIKG

SEQ ID NO: 1226 - protein, 9 aa, synthetic construct
AQTTIDGPC

SEQ ID NO: 1227 - protein, 9 aa, synthetic construct
AQFRLYMSD

SEQ ID NO: 1228 - protein, 9 aa, synthetic construct
AQSVIAWGD

SEQ ID NO: 1229 - protein, 9 aa, synthetic construct
AQSIWHGVL

SEQ ID NO: 1230 - protein, 9 aa, synthetic construct
AQQALLYKD

SEQ ID NO: 1231 - protein, 9 aa, synthetic construct
AQKSSLSSM

SEQ ID NO: 1232 - protein, 9 aa, synthetic construct
AQVRPTAAE

SEQ ID NO: 1233 - protein, 9 aa, synthetic construct
AQVICSEVF

SEQ ID NO: 1234 - protein, 9 aa, synthetic construct
AQSRSGSGA

SEQ ID NO: 1235 - protein, 9 aa, synthetic construct
AQSNVTVDW

SEQ ID NO: 1236 - protein, 9 aa, synthetic construct
AQDTAKRVG

SEQ ID NO: 1237 - protein, 9 aa, synthetic construct
AQISQYLCS

SEQ ID NO: 1238 - protein, 9 aa, synthetic construct
AQSIMFRTD

SEQ ID NO: 1239 - protein, 9 aa, synthetic construct
AQSRAQNPC

SEQ ID NO: 1240 - protein, 9 aa, synthetic construct
AQVNATARL

SEQ ID NO: 1241 - protein, 9 aa, synthetic construct
AQTIRTGIA

SEQ ID NO: 1242 - protein, 9 aa, synthetic construct
AQVICGLIK

SEQ ID NO: 1243 - protein, 9 aa, synthetic construct
AQLHLGKML

SEQ ID NO: 1244 - protein, 9 aa, synthetic construct
AQTMTQMGS

SEQ ID NO: 1245 - protein, 9 aa, synthetic construct
AQYRLSWHV

SEQ ID NO: 1246 - protein, 9 aa, synthetic construct
AQPRTGHTT

SEQ ID NO: 1247 - protein, 9 aa, synthetic construct
AQWAGAQAN

SEQ ID NO: 1248 - protein, 9 aa, synthetic construct
AQYVSTLRA

SEQ ID NO: 1249 - protein, 9 aa, synthetic construct
AQIQSPVGV

SEQ ID NO: 1250 - protein, 9 aa, synthetic construct
AQSMGLAYK

SEQ ID NO: 1251 - protein, 9 aa, synthetic construct
AQEPGLNRG

SEQ ID NO: 1252 - protein, 9 aa, synthetic construct
AQCEGFLSG

SEQ ID NO: 1253 - protein, 9 aa, synthetic construct
AQTYWYQPG

SEQ ID NO: 1254 - protein, 9 aa, synthetic construct
AQCASLCSI

SEQ ID NO: 1255 - protein, 9 aa, synthetic construct
AQLKICRGV

SEQ ID NO: 1256 - protein, 9 aa, synthetic construct
AQCHVVSKG

SEQ ID NO: 1257 - protein, 9 aa, synthetic construct
AQEGGDKGV

SEQ ID NO: 1258 - protein, 9 aa, synthetic construct
AQGMSLLTR

SEQ ID NO: 1259 - protein, 9 aa, synthetic construct
AQVYPKYFS

SEQ ID NO: 1260 - protein, 9 aa, synthetic construct
AQDQRTSLH

SEQ ID NO: 1261 - protein, 9 aa, synthetic construct
AQYRAADCS

SEQ ID NO: 1262 - protein, 9 aa, synthetic construct
AQTGSGART

SEQ ID NO: 1263 - protein, 9 aa, synthetic construct
AQSNRLSIP

SEQ ID NO: 1264 - protein, 9 aa, synthetic construct
AQSGTNGMK

SEQ ID NO: 1265 - protein, 9 aa, synthetic construct
AQVKQMVFK

SEQ ID NO: 1266 - protein, 9 aa, synthetic construct
AQRNCPCDM

SEQ ID NO: 1267 - protein, 9 aa, synthetic construct
AQLPVGWAS

SEQ ID NO: 1268 - protein, 9 aa, synthetic construct
AQGEWIMEL

SEQ ID NO: 1269 - protein, 9 aa, synthetic construct
AQRRNSVGS

SEQ ID NO: 1270 - protein, 9 aa, synthetic construct
AQTMVRDGM

SEQ ID NO: 1271 - protein, 9 aa, synthetic construct
AQGRETMLP

SEQ ID NO: 1272 - protein, 9 aa, synthetic construct
AQVHTPCEG

SEQ ID NO: 1273 - protein, 9 aa, synthetic construct
AQMGCGPLF

SEQ ID NO: 1274 - protein, 9 aa, synthetic construct
AQEPPKNPK

SEQ ID NO: 1275 - protein, 9 aa, synthetic construct
AQQKTVMYA

SEQ ID NO: 1276 - protein, 9 aa, synthetic construct
AQVPCQGVM

SEQ ID NO: 1277 - protein, 9 aa, synthetic construct
AQIVTRQVN

SEQ ID NO: 1278 - protein, 9 aa, synthetic construct
AQLVTPKCG

SEQ ID NO: 1279 - protein, 9 aa, synthetic construct
AQHTGDCAE

SEQ ID NO: 1280 - protein, 9 aa, synthetic construct
AQLVCSNMM

SEQ ID NO: 1281 - protein, 9 aa, synthetic construct
AQVGSNGDR

SEQ ID NO: 1282 - protein, 9 aa, synthetic construct
AQPMVEMRK

SEQ ID NO: 1283 - protein, 9 aa, synthetic construct
AQQLSVGPH

SEQ ID NO: 1284 - protein, 9 aa, synthetic construct
AQGLYDLLI

SEQ ID NO: 1285 - protein, 9 aa, synthetic construct
AQRWGSGPF

SEQ ID NO: 1286 - protein, 9 aa, synthetic construct
AQMVQVATT

SEQ ID NO: 1287 - protein, 9 aa, synthetic construct
AQHNSLSYM

SEQ ID NO: 1288 - protein, 9 aa, synthetic construct
AQGVIREGN

SEQ ID NO: 1289 - protein, 9 aa, synthetic construct
AQQMVIKMS

SEQ ID NO: 1290 - protein, 9 aa, synthetic construct
AQTSQKNCR

SEQ ID NO: 1291 - protein, 9 aa, synthetic construct
AQKFMEPNH

SEQ ID NO: 1292 - protein, 9 aa, synthetic construct
AQVRLDSGR

SEQ ID NO: 1293 - protein, 9 aa, synthetic construct
AQCGNERQF

SEQ ID NO: 1294 - protein, 9 aa, synthetic construct
AQQYPEYRI

SEQ ID NO: 1295 - protein, 9 aa, synthetic construct
AQLWDMNSP

SEQ ID NO: 1296 - protein, 9 aa, synthetic construct
AQLLRVIFG

SEQ ID NO: 1297 - protein, 9 aa, synthetic construct
AQMMKQCDT

SEQ ID NO: 1298 - protein, 9 aa, synthetic construct
AQRSGISKH

SEQ ID NO: 1299 - protein, 9 aa, synthetic construct
AQSPYNMGS

SEQ ID NO: 1300 - protein, 9 aa, synthetic construct
AQVDKMIKG

SEQ ID NO: 1301 - protein, 9 aa, synthetic construct
AQVEDFEPN

SEQ ID NO: 1302 - protein, 9 aa, synthetic construct
AQSPPWSET

SEQ ID NO: 1303 - protein, 9 aa, synthetic construct
AQMVSECHM

SEQ ID NO: 1304 - protein, 9 aa, synthetic construct
AQTVVDDWP

SEQ ID NO: 1305 - protein, 9 aa, synthetic construct
AQGILRLGL

SEQ ID NO: 1306 - protein, 9 aa, synthetic construct
AQCFVTVRE

SEQ ID NO: 1307 - protein, 9 aa, synthetic construct
AQGMKSLGS

SEQ ID NO: 1308 - protein, 9 aa, synthetic construct
AQSNYSAAC

SEQ ID NO: 1309 - protein, 9 aa, synthetic construct
AQSMVGLSY

SEQ ID NO: 1310 - protein, 9 aa, synthetic construct
AQSTNGIQP

SEQ ID NO: 1311 - protein, 9 aa, synthetic construct
AQNHASRVV

SEQ ID NO: 1312 - protein, 9 aa, synthetic construct
AQFCPYIRM

SEQ ID NO: 1313 - protein, 9 aa, synthetic construct
AQGRSMVHS

SEQ ID NO: 1314 - protein, 9 aa, synthetic construct
AQQAVMTLS

SEQ ID NO: 1315 - protein, 9 aa, synthetic construct
AQVTAKVQG

SEQ ID NO: 1316 - protein, 9 aa, synthetic construct
AQFGVSLWA

SEQ ID NO: 1317 - protein, 9 aa, synthetic construct
AQMLCTPAD

SEQ ID NO: 1318 - protein, 9 aa, synthetic construct
AQGDSPYNS

SEQ ID NO: 1319 - protein, 9 aa, synthetic construct
AQWCTDVHR

SEQ ID NO: 1320 - protein, 9 aa, synthetic construct
AQSRTTRYV

SEQ ID NO: 1321 - protein, 9 aa, synthetic construct
AQTFEGPLV

SEQ ID NO: 1322 - protein, 9 aa, synthetic construct
AQLKGISKG

SEQ ID NO: 1323 - protein, 9 aa, synthetic construct
AQERSMQRD

SEQ ID NO: 1324 - protein, 9 aa, synthetic construct
AQLTPNADW

SEQ ID NO: 1325 - protein, 9 aa, synthetic construct
AQKPLKDIL

SEQ ID NO: 1326 - protein, 9 aa, synthetic construct
AQAQSFSSR

SEQ ID NO: 1327 - protein, 9 aa, synthetic construct
AQQAPPYIL

SEQ ID NO: 1328 - protein, 9 aa, synthetic construct
AQQRDCNGP

SEQ ID NO: 1329 - protein, 9 aa, synthetic construct
AQGQNIPQK

SEQ ID NO: 1330 - protein, 9 aa, synthetic construct
AQVCAKDRV

SEQ ID NO: 1331 - protein, 9 aa, synthetic construct
AQGFKLKYN

SEQ ID NO: 1332 - protein, 9 aa, synthetic construct
AQTNGTITT

SEQ ID NO: 1333 - protein, 9 aa, synthetic construct
AQFKTVRGI

SEQ ID NO: 1334 - protein, 9 aa, synthetic construct
AQCKNSAGI

SEQ ID NO: 1335 - protein, 9 aa, synthetic construct
AQVIHECYI

SEQ ID NO: 1336 - protein, 9 aa, synthetic construct
AQSVQVQIY

SEQ ID NO: 1337 - protein, 9 aa, synthetic construct
AQNGTIPPC

SEQ ID NO: 1338 - protein, 9 aa, synthetic construct
AQQMVRGGE

SEQ ID NO: 1339 - protein, 9 aa, synthetic construct
AQLPGFGLS

SEQ ID NO: 1340 - protein, 9 aa, synthetic construct
AQCTGKMEG

SEQ ID NO: 1341 - protein, 9 aa, synthetic construct
AQTMFKNGE

SEQ ID NO: 1342 - protein, 9 aa, synthetic construct
AQVLNRKCT

SEQ ID NO: 1343 - protein, 9 aa, synthetic construct
AQECDRNGY

SEQ ID NO: 1344 - protein, 9 aa, synthetic construct
AQSVCGDAA

SEQ ID NO: 1345 - protein, 9 aa, synthetic construct
AQLVCSAIQ

SEQ ID NO: 1346 - protein, 9 aa, synthetic construct
AQDVLSYRM

SEQ ID NO: 1347 - protein, 9 aa, synthetic construct
AQRLSSAST

SEQ ID NO: 1348 - protein, 9 aa, synthetic construct
AQNESYAYK

SEQ ID NO: 1349 - protein, 9 aa, synthetic construct
AQSMFSQVE

SEQ ID NO: 1350 - protein, 9 aa, synthetic construct
AQNPIKCGV

SEQ ID NO: 1351 - protein, 9 aa, synthetic construct
AQVLVGGRG

SEQ ID NO: 1352 - protein, 9 aa, synthetic construct
AQAVIRIGA

SEQ ID NO: 1353 - protein, 9 aa, synthetic construct
AQRQVHVDC

SEQ ID NO: 1354 - protein, 9 aa, synthetic construct
AQDYVECRG

SEQ ID NO: 1355 - protein, 9 aa, synthetic construct
AQSATPTLR

SEQ ID NO: 1356 - protein, 9 aa, synthetic construct
AQLYVHQLP

SEQ ID NO: 1357 - protein, 9 aa, synthetic construct
AQMPYTSLE

SEQ ID NO: 1358 - protein, 9 aa, synthetic construct
AQQSPIGMS

SEQ ID NO: 1359 - protein, 9 aa, synthetic construct
AQRSNSALN

SEQ ID NO: 1360 - protein, 9 aa, synthetic construct
AQLTLAGAE

SEQ ID NO: 1361 - protein, 9 aa, synthetic construct
AQRVHLRVH

SEQ ID NO: 1362 - protein, 9 aa, synthetic construct
AQPGRIRPP

SEQ ID NO: 1363 - protein, 9 aa, synthetic construct
AQRDALKPS

SEQ ID NO: 1364 - protein, 9 aa, synthetic construct
AQCDLGYRS

SEQ ID NO: 1365 - protein, 9 aa, synthetic construct
AQNRKSNWC

SEQ ID NO: 1366 - protein, 9 aa, synthetic construct
AQNFNLQVS

SEQ ID NO: 1367 - protein, 9 aa, synthetic construct
AQFANGICS

SEQ ID NO: 1368 - protein, 9 aa, synthetic construct
AQTVLRLGE

SEQ ID NO: 1369 - protein, 9 aa, synthetic construct
DGHQSRLGP

SEQ ID NO: 1370 - protein, 9 aa, synthetic construct
DGRRIVPDK

SEQ ID NO: 1371 - protein, 9 aa, synthetic construct
DGAISPHVA

SEQ ID NO: 1372 - protein, 9 aa, synthetic construct
DGRPVVMLS

SEQ ID NO: 1373 - protein, 9 aa, synthetic construct
DGTSTSRDR

SEQ ID NO: 1374 - protein, 9 aa, synthetic construct
DGLISRHGA

SEQ ID NO: 1375 - protein, 9 aa, synthetic construct
DGRSMGFNP

SEQ ID NO: 1376 - protein, 9 aa, synthetic construct
DGAVSGMRN

SEQ ID NO: 1377 - protein, 9 aa, synthetic construct
DGKAPNSGM

SEQ ID NO: 1378 - protein, 9 aa, synthetic construct
DGGNNLQRK

SEQ ID NO: 1379 - protein, 9 aa, synthetic construct
DGRALERKG

SEQ ID NO: 1380 - protein, 9 aa, synthetic construct
DGRLMKIAS

SEQ ID NO: 1381 - protein, 9 aa, synthetic construct
DGVNSSGPN

SEQ ID NO: 1382 - protein, 9 aa, synthetic construct
DGKKNGLTV

SEQ ID NO: 1383 - protein, 9 aa, synthetic construct
DGTAKELGL

SEQ ID NO: 1384 - protein, 9 aa, synthetic construct
DGQWKGLRE

SEQ ID NO: 1385 - protein, 9 aa, synthetic construct
DGRTMTSNR

SEQ ID NO: 1386 - protein, 9 aa, synthetic construct
DGGVNKLGR

SEQ ID NO: 1387 - protein, 9 aa, synthetic construct
DGDHPNNRK

SEQ ID NO: 1388 - protein, 9 aa, synthetic construct
DGIRASRSD

SEQ ID NO: 1389 - protein, 9 aa, synthetic construct
DGRDARTGY

SEQ ID NO: 1390 - protein, 9 aa, synthetic construct
DGDTRALYS

SEQ ID NO: 1391 - protein, 9 aa, synthetic construct
DGESVRPMR

SEQ ID NO: 1392 - protein, 9 aa, synthetic construct
DGTAPRRPV

SEQ ID NO: 1393 - protein, 9 aa, synthetic construct
DGEHTSELQ

SEQ ID NO: 1394 - protein, 9 aa, synthetic construct
DGSRQKFGS

SEQ ID NO: 1395 - protein, 9 aa, synthetic construct
DGRHTSKMV

SEQ ID NO: 1396 - protein, 9 aa, synthetic construct
DGFKHSAMS

SEQ ID NO: 1397 - protein, 9 aa, synthetic construct
DGLLNGRIQ

SEQ ID NO: 1398 - protein, 9 aa, synthetic construct
DGTRRATPD

SEQ ID NO: 1399 - protein, 9 aa, synthetic construct
DGNYKYVQG

SEQ ID NO: 1400 - protein, 9 aa, synthetic construct
DGWMGGAAG

SEQ ID NO: 1401 - protein, 9 aa, synthetic construct
DGIQYKTVG

SEQ ID NO: 1402 - protein, 9 aa, synthetic construct
DGQYRDKST

SEQ ID NO: 1403 - protein, 9 aa, synthetic construct
DGVNLSRGH

SEQ ID NO: 1404 - protein, 9 aa, synthetic construct
DGHLPRWNP

SEQ ID NO: 1405 - protein, 9 aa, synthetic construct
DGLSLMALR

SEQ ID NO: 1406 - protein, 9 aa, synthetic construct
DGWNKVQAR

SEQ ID NO: 1407 - protein, 9 aa, synthetic construct
DGHDAGWRG

SEQ ID NO: 1408 - protein, 9 aa, synthetic construct
DGYASMKTL

SEQ ID NO: 1409 - protein, 9 aa, synthetic construct
DGMNKKAGG

SEQ ID NO: 1410 - protein, 9 aa, synthetic construct
DGFVKKVYG

SEQ ID NO: 1411 - protein, 9 aa, synthetic construct
DGLQPVRAR

SEQ ID NO: 1412 - protein, 9 aa, synthetic construct
DGIGHLVGG

SEQ ID NO: 1413 - protein, 9 aa, synthetic construct
DGYRSPNVK

SEQ ID NO: 1414 - protein, 9 aa, synthetic construct
DGRMRTDLY

SEQ ID NO: 1415 - protein, 9 aa, synthetic construct
DGVSKLYKI

SEQ ID NO: 1416 - protein, 9 aa, synthetic construct
DGSQKMSVR

SEQ ID NO: 1417 - protein, 9 aa, synthetic construct
DGRPSPNRA

SEQ ID NO: 1418 - protein, 9 aa, synthetic construct
DGRASSTER

SEQ ID NO: 1419 - protein, 9 aa, synthetic construct
DGTPLHDNV

SEQ ID NO: 1420 - protein, 9 aa, synthetic construct
DGYKGQAMR

SEQ ID NO: 1421 - protein, 9 aa, synthetic construct
DGAAKYRSP

SEQ ID NO: 1422 - protein, 9 aa, synthetic construct
DGRGSHSPG

SEQ ID NO: 1423 - protein, 9 aa, synthetic construct
DGRNNPIWA

SEQ ID NO: 1424 - protein, 9 aa, synthetic construct
DGNNAQRPS

SEQ ID NO: 1425 - protein, 9 aa, synthetic construct
DGKIAMVKG

SEQ ID NO: 1426 - protein, 9 aa, synthetic construct
DGMDVGRYG

SEQ ID NO: 1427 - protein, 9 aa, synthetic construct
DGGMSPVWK

SEQ ID NO: 1428 - protein, 9 aa, synthetic construct
DGHAQRKDY

SEQ ID NO: 1429 - protein, 9 aa, synthetic construct
DGRESCKGT

SEQ ID NO: 1430 - protein, 9 aa, synthetic construct
DGCTYSRMP

SEQ ID NO: 1431 - protein, 9 aa, synthetic construct
DGCLEGAMY

SEQ ID NO: 1432 - protein, 9 aa, synthetic construct
DGLGSMSSW

SEQ ID NO: 1433 - protein, 9 aa, synthetic construct
DGALKCRSE

SEQ ID NO: 1434 - protein, 9 aa, synthetic construct
DGSWTAICS

SEQ ID NO: 1435 - protein, 9 aa, synthetic construct
DGSKPSRIT

SEQ ID NO: 1436 - protein, 9 aa, synthetic construct
DGRQGKSRI

SEQ ID NO: 1437 - protein, 9 aa, synthetic construct
DGRCIDYEV

SEQ ID NO: 1438 - protein, 9 aa, synthetic construct
DGEEAPWKM

SEQ ID NO: 1439 - protein, 9 aa, synthetic construct
DGSVVSGMQ

SEQ ID NO: 1440 - protein, 9 aa, synthetic construct
DGADNGLHS

SEQ ID NO: 1441 - protein, 9 aa, synthetic construct
DGSCLSSAI

SEQ ID NO: 1442 - protein, 9 aa, synthetic construct
DGGSVTKWI

SEQ ID NO: 1443 - protein, 9 aa, synthetic construct
DGDGVKDSQ

SEQ ID NO: 1444 - protein, 9 aa, synthetic construct
DGCNVVYPR

SEQ ID NO: 1445 - protein, 9 aa, synthetic construct
DGVFQGSTV

SEQ ID NO: 1446 - protein, 9 aa, synthetic construct
DGLRCPDAE

SEQ ID NO: 1447 - protein, 9 aa, synthetic construct
DGPLCSRRR

SEQ ID NO: 1448 - protein, 9 aa, synthetic construct
DGHNWGRAE

SEQ ID NO: 1449 - protein, 9 aa, synthetic construct
DGSVDPCRT

SEQ ID NO: 1450 - protein, 9 aa, synthetic construct
DGFWHDMRS

SEQ ID NO: 1451 - protein, 9 aa, synthetic construct
DGEEDYVFY

SEQ ID NO: 1452 - protein, 9 aa, synthetic construct
DGRGDSVCM

SEQ ID NO: 1453 - protein, 9 aa, synthetic construct
DGRNTMLVS

SEQ ID NO: 1454 - protein, 9 aa, synthetic construct
DGRQGLSQC

SEQ ID NO: 1455 - protein, 9 aa, synthetic construct
DGVHACPQA

SEQ ID NO: 1456 - protein, 9 aa, synthetic construct
DGVIKRQCA

SEQ ID NO: 1457 - protein, 9 aa, synthetic construct
DGACETLFV

SEQ ID NO: 1458 - protein, 9 aa, synthetic construct
DGLPGPFDC

SEQ ID NO: 1459 - protein, 9 aa, synthetic construct
DGVAKEPFL

SEQ ID NO: 1460 - protein, 9 aa, synthetic construct
DGGICLLAS

SEQ ID NO: 1461 - protein, 9 aa, synthetic construct
DGRSRKPMT

SEQ ID NO: 1462 - protein, 9 aa, synthetic construct
DGYDCPSRG

SEQ ID NO: 1463 - protein, 9 aa, synthetic construct
DGQNSLSFK

SEQ ID NO: 1464 - protein, 9 aa, synthetic construct
DGAYRSCAS

SEQ ID NO: 1465 - protein, 9 aa, synthetic construct
DGCKSQLAR

SEQ ID NO: 1466 - protein, 9 aa, synthetic construct
DGAQDIALF

SEQ ID NO: 1467 - protein, 9 aa, synthetic construct
DGEINTYCM

SEQ ID NO: 1468 - protein, 9 aa, synthetic construct
DGSDSWGDN

SEQ ID NO: 1469 - protein, 9 aa, synthetic construct
DGLRYPDPE

SEQ ID NO: 1470 - protein, 9 aa, synthetic construct
DGWLASDES

SEQ ID NO: 1471 - protein, 9 aa, synthetic construct
DGYLSSVPG

SEQ ID NO: 1472 - protein, 9 aa, synthetic construct
DGVVRCLSF

SEQ ID NO: 1473 - protein, 9 aa, synthetic construct
DGCKIGTIA

SEQ ID NO: 1474 - protein, 9 aa, synthetic construct
DGLVGGVCS

SEQ ID NO: 1475 - protein, 9 aa, synthetic construct
DGDLRAVRM

SEQ ID NO: 1476 - protein, 9 aa, synthetic construct
DGAECRFDN

SEQ ID NO: 1477 - protein, 9 aa, synthetic construct
DGSCLVERF

SEQ ID NO: 1478 - protein, 9 aa, synthetic construct
DGERIRIFD

SEQ ID NO: 1479 - protein, 9 aa, synthetic construct
DGSRPAFCL

SEQ ID NO: 1480 - protein, 9 aa, synthetic construct
DGAWVNTHE

SEQ ID NO: 1481 - protein, 9 aa, synthetic construct
DGTMPAPCS

SEQ ID NO: 1482 - protein, 9 aa, synthetic construct
DGRGFPEGN

SEQ ID NO: 1483 - protein, 9 aa, synthetic construct
DGWGPNRCD

SEQ ID NO: 1484 - protein, 9 aa, synthetic construct
DGRPVVHTY

SEQ ID NO: 1485 - protein, 9 aa, synthetic construct
DGVAHDQVP

SEQ ID NO: 1486 - protein, 9 aa, synthetic construct
DGCCAGIGT

SEQ ID NO: 1487 - protein, 9 aa, synthetic construct
DGYRNLGYW

SEQ ID NO: 1488 - protein, 9 aa, synthetic construct
DGLGNLPCR

SEQ ID NO: 1489 - protein, 9 aa, synthetic construct
DGMVDPHLY

SEQ ID NO: 1490 - protein, 9 aa, synthetic construct
DGWTEYDNN

SEQ ID NO: 1491 - protein, 9 aa, synthetic construct
DGGFFVTDE

SEQ ID NO: 1492 - protein, 9 aa, synthetic construct
DGLSGGGGK

SEQ ID NO: 1493 - protein, 9 aa, synthetic construct
DGKVGMIMP

SEQ ID NO: 1494 - protein, 9 aa, synthetic construct
DGGVGLYYL

SEQ ID NO: 1495 - protein, 9 aa, synthetic construct
DGVYKMLDR

SEQ ID NO: 1496 - protein, 9 aa, synthetic construct
DGGGSFLNW

SEQ ID NO: 1497 - protein, 9 aa, synthetic construct
DGYKWYRPT

SEQ ID NO: 1498 - protein, 9 aa, synthetic construct
DGSYIICCP

SEQ ID NO: 1499 - protein, 9 aa, synthetic construct
DGQRVTKLP

SEQ ID NO: 1500 - protein, 9 aa, synthetic construct
DGFARRSVQ

SEQ ID NO: 1501 - protein, 9 aa, synthetic construct
DGWLSLLLA

SEQ ID NO: 1502 - protein, 9 aa, synthetic construct
DGDRREVLC

SEQ ID NO: 1503 - protein, 9 aa, synthetic construct
DGARVSRIK

SEQ ID NO: 1504 - protein, 9 aa, synthetic construct
DGFAYLDPD

SEQ ID NO: 1505 - protein, 9 aa, synthetic construct
DGIYEDWKS

SEQ ID NO: 1506 - protein, 9 aa, synthetic construct
DGGGCTLVD

SEQ ID NO: 1507 - protein, 9 aa, synthetic construct
DGRKPHGDG

SEQ ID NO: 1508 - protein, 9 aa, synthetic construct
DGHRANGNL

SEQ ID NO: 1509 - protein, 9 aa, synthetic construct
DGLNPTTIS

SEQ ID NO: 1510 - protein, 9 aa, synthetic construct
DGPHGAVDG

SEQ ID NO: 1511 - protein, 9 aa, synthetic construct
DGGHCESSS

SEQ ID NO: 1512 - protein, 9 aa, synthetic construct
DGWMISPKK

SEQ ID NO: 1513 - protein, 9 aa, synthetic construct
DGWCDIHQF

SEQ ID NO: 1514 - protein, 9 aa, synthetic construct
DGLNRRSNV

SEQ ID NO: 1515 - protein, 9 aa, synthetic construct
DGLVVGHAG

SEQ ID NO: 1516 - protein, 9 aa, synthetic construct
DGSYDLEGF

SEQ ID NO: 1517 - protein, 9 aa, synthetic construct
DGNPEKCIS

SEQ ID NO: 1518 - protein, 9 aa, synthetic construct
DGNHTFYEG

SEQ ID NO: 1519 - protein, 9 aa, synthetic construct
DGYSPTWLA

SEQ ID NO: 1520 - protein, 9 aa, synthetic construct
DGDMCKAEF

SEQ ID NO: 1521 - protein, 9 aa, synthetic construct
DGCSSSSLY

SEQ ID NO: 1522 - protein, 9 aa, synthetic construct
DGVHVSIAC

SEQ ID NO: 1523 - protein, 9 aa, synthetic construct
DGYFLDVQC

SEQ ID NO: 1524 - protein, 9 aa, synthetic construct
DGDPRRCLE

SEQ ID NO: 1525 - protein, 9 aa, synthetic construct
DGWDMGRSG

SEQ ID NO: 1526 - protein, 9 aa, synthetic construct
DGCRSGGAR

SEQ ID NO: 1527 - protein, 9 aa, synthetic construct
DGVKCFSEF

SEQ ID NO: 1528 - protein, 9 aa, synthetic construct
DGCGEPERC

SEQ ID NO: 1529 - protein, 9 aa, synthetic construct
DGFRQTVCG

SEQ ID NO: 1530 - protein, 9 aa, synthetic construct
DGTQTNIHH

SEQ ID NO: 1531 - protein, 9 aa, synthetic construct
DGMRRMKDN

SEQ ID NO: 1532 - protein, 9 aa, synthetic construct
DGSATNLVR

SEQ ID NO: 1533 - protein, 9 aa, synthetic construct
DGDPLYRVH

SEQ ID NO: 1534 - protein, 9 aa, synthetic construct
DGTSCFTAS

SEQ ID NO: 1535 - protein, 9 aa, synthetic construct
DGCEDTVYG

SEQ ID NO: 1536 - protein, 9 aa, synthetic construct
DGLEFFSIV

SEQ ID NO: 1537 - protein, 9 aa, synthetic construct
DGTDTVCRG

SEQ ID NO: 1538 - protein, 9 aa, synthetic construct
DGGAQMVEW

SEQ ID NO: 1539 - protein, 9 aa, synthetic construct
DGLATMPLC

SEQ ID NO: 1540 - protein, 9 aa, synthetic construct
DGNTGWFDG

SEQ ID NO: 1541 - protein, 9 aa, synthetic construct
DGNPMSAFP

SEQ ID NO: 1542 - protein, 9 aa, synthetic construct
DGRSLAFPY

SEQ ID NO: 1543 - protein, 9 aa, synthetic construct
DGRHCWSSF

SEQ ID NO: 1544 - protein, 9 aa, synthetic construct
DGEVCERLR

SEQ ID NO: 1545 - protein, 9 aa, synthetic construct
DGCAVMVEP

SEQ ID NO: 1546 - protein, 9 aa, synthetic construct
DGQPLVLAV

SEQ ID NO: 1547 - protein, 9 aa, synthetic construct
DGSRRLKLK

SEQ ID NO: 1548 - protein, 9 aa, synthetic construct
DGMPQGRPP

SEQ ID NO: 1549 - protein, 9 aa, synthetic construct
DGAAVRCHV

SEQ ID NO: 1550 - protein, 9 aa, synthetic construct
DGKGVTRSY

SEQ ID NO: 1551 - protein, 9 aa, synthetic construct
DGLKNRMLS

SEQ ID NO: 1552 - protein, 9 aa, synthetic construct
DGSLASEGR

SEQ ID NO: 1553 - protein, 9 aa, synthetic construct
DGLRRPLRV

SEQ ID NO: 1554 - protein, 9 aa, synthetic construct
DGVGSKRVR

SEQ ID NO: 1555 - protein, 9 aa, synthetic construct
DGESSDKGS

SEQ ID NO: 1556 - protein, 9 aa, synthetic construct
DGTGGRLLP

SEQ ID NO: 1557 - protein, 9 aa, synthetic construct
DGVCKSLQK

SEQ ID NO: 1558 - protein, 9 aa, synthetic construct
DGRSQPIAW

SEQ ID NO: 1559 - protein, 9 aa, synthetic construct
DGRTFLADM

SEQ ID NO: 1560 - protein, 9 aa, synthetic construct
DGEATCKRV

SEQ ID NO: 1561 - protein, 9 aa, synthetic construct
DGRKVTKAN

SEQ ID NO: 1562 - protein, 9 aa, synthetic construct
DGDLRHPSC

SEQ ID NO: 1563 - protein, 9 aa, synthetic construct
DGNATHGRR

SEQ ID NO: 1564 - protein, 9 aa, synthetic construct
DGHSYQCDL

SEQ ID NO: 1565 - protein, 9 aa, synthetic construct
DGMSAQSTG

SEQ ID NO: 1566 - protein, 9 aa, synthetic construct
DGASSICRK

SEQ ID NO: 1567 - protein, 9 aa, synthetic construct
DGLCKAKWI

SEQ ID NO: 1568 - protein, 9 aa, synthetic construct
DGKGGSCHS

SEQ ID NO: 1569 - protein, 9 aa, synthetic construct
DGLAVGIGR

SEQ ID NO: 1570 - protein, 9 aa, synthetic construct
DGSKARTYR

SEQ ID NO: 1571 - protein, 9 aa, synthetic construct
DGCTSYVSP

SEQ ID NO: 1572 - protein, 9 aa, synthetic construct
DGIVGIYKG

SEQ ID NO: 1573 - protein, 9 aa, synthetic construct
DGFSGDRTL

SEQ ID NO: 1574 - protein, 9 aa, synthetic construct
DGFSQKKKS

SEQ ID NO: 1575 - protein, 9 aa, synthetic construct
DGRLQMCRV

SEQ ID NO: 1576 - protein, 9 aa, synthetic construct
DGKKCNLMH

SEQ ID NO: 1577 - protein, 9 aa, synthetic construct
DGTGKLRAW

SEQ ID NO: 1578 - protein, 9 aa, synthetic construct
DGCSNWMFT

SEQ ID NO: 1579 - protein, 9 aa, synthetic construct
DGLGFKAPR

SEQ ID NO: 1580 - protein, 9 aa, synthetic construct
DGKRASGKV

SEQ ID NO: 1581 - protein, 9 aa, synthetic construct
DGYSGTVCI

SEQ ID NO: 1582 - protein, 9 aa, synthetic construct
DGTLVRLRL

SEQ ID NO: 1583 - protein, 9 aa, synthetic construct
DGHISRFLR

SEQ ID NO: 1584 - protein, 9 aa, synthetic construct
DGNDHRYSG

SEQ ID NO: 1585 - protein, 9 aa, synthetic construct
DGGKQKVCS

SEQ ID NO: 1586 - protein, 9 aa, synthetic construct
DGSVTPKNQ

SEQ ID NO: 1587 - protein, 9 aa, synthetic construct
DGKLSGHHA

SEQ ID NO: 1588 - protein, 9 aa, synthetic construct
DGMHCKLPS

SEQ ID NO: 1589 - protein, 9 aa, synthetic construct
DGRAPAARK

SEQ ID NO: 1590 - protein, 9 aa, synthetic construct
DGFCGEFNT

SEQ ID NO: 1591 - protein, 9 aa, synthetic construct
DGDHPAGMR

SEQ ID NO: 1592 - protein, 9 aa, synthetic construct
DGSSGLCGT

SEQ ID NO: 1593 - protein, 9 aa, synthetic construct
DGRAVGSVW

SEQ ID NO: 1594 - protein, 9 aa, synthetic construct
DGLAPCIYK

SEQ ID NO: 1595 - protein, 9 aa, synthetic construct
DGGLRALPS

SEQ ID NO: 1596 - protein, 9 aa, synthetic construct
DGGLSRLCI

SEQ ID NO: 1597 - protein, 9 aa, synthetic construct
DGRTYGTKR

SEQ ID NO: 1598 - protein, 9 aa, synthetic construct
DGAVAHSLE

SEQ ID NO: 1599 - protein, 9 aa, synthetic construct
DGMYSWGAD

SEQ ID NO: 1600 - protein, 9 aa, synthetic construct
DGASDWHLD

SEQ ID NO: 1601 - protein, 9 aa, synthetic construct
DGISFHIAF

SEQ ID NO: 1602 - protein, 9 aa, synthetic construct
DGPVADGSH

SEQ ID NO: 1603 - protein, 9 aa, synthetic construct
DGHLSAYRS

SEQ ID NO: 1604 - protein, 9 aa, synthetic construct
DGFRGANMP

SEQ ID NO: 1605 - protein, 9 aa, synthetic construct
DGHWLAAQC

SEQ ID NO: 1606 - protein, 9 aa, synthetic construct
DGYDEYMHV

SEQ ID NO: 1607 - protein, 9 aa, synthetic construct
DGECDVYVY

SEQ ID NO: 1608 - protein, 9 aa, synthetic construct
DGSMSPHKG

SEQ ID NO: 1609 - protein, 9 aa, synthetic construct
DGVSLCPDG

SEQ ID NO: 1610 - protein, 9 aa, synthetic construct
DGIDALCSF

SEQ ID NO: 1611 - protein, 9 aa, synthetic construct
DGFTSGPIH

SEQ ID NO: 1612 - protein, 9 aa, synthetic construct
DGQSSESES

SEQ ID NO: 1613 - protein, 9 aa, synthetic construct
DGLWYGEGT

SEQ ID NO: 1614 - protein, 9 aa, synthetic construct
DGATNRPIQ

SEQ ID NO: 1615 - protein, 9 aa, synthetic construct
DGRRCAEGA

SEQ ID NO: 1616 - protein, 9 aa, synthetic construct
DGIEWWGLA

SEQ ID NO: 1617 - protein, 9 aa, synthetic construct
DGGQCTGGP

SEQ ID NO: 1618 - protein, 9 aa, synthetic construct
DGHSYVMKV

SEQ ID NO: 1619 - protein, 9 aa, synthetic construct
DGYNRTMWS

SEQ ID NO: 1620 - protein, 9 aa, synthetic construct
DGYCQDYYW

SEQ ID NO: 1621 - protein, 9 aa, synthetic construct
DGKKATSKL

SEQ ID NO: 1622 - protein, 9 aa, synthetic construct
DGWLCADVM

SEQ ID NO: 1623 - protein, 9 aa, synthetic construct
DGSSFCNIL

SEQ ID NO: 1624 - protein, 9 aa, synthetic construct
DGPTVESAN

SEQ ID NO: 1625 - protein, 9 aa, synthetic construct
DGHPVRNCK

SEQ ID NO: 1626 - protein, 9 aa, synthetic construct
DGFIDSGCA

SEQ ID NO: 1627 - protein, 9 aa, synthetic construct
DGVRLWHMA

SEQ ID NO: 1628 - protein, 9 aa, synthetic construct
DGTVTMLWV

SEQ ID NO: 1629 - protein, 9 aa, synthetic construct
DGDGERRCS

SEQ ID NO: 1630 - protein, 9 aa, synthetic construct
DGIIMRRKS

SEQ ID NO: 1631 - protein, 9 aa, synthetic construct
DGVNSPSLF

SEQ ID NO: 1632 - protein, 9 aa, synthetic construct
DGVEMPRSE

SEQ ID NO: 1633 - protein, 9 aa, synthetic construct
DGVLSRRSG

SEQ ID NO: 1634 - protein, 9 aa, synthetic construct
DGWRTDRPD

SEQ ID NO: 1635 - protein, 9 aa, synthetic construct
DGTVCSSGF

SEQ ID NO: 1636 - protein, 9 aa, synthetic construct
DGEPLWFPS

SEQ ID NO: 1637 - protein, 9 aa, synthetic construct
DGCMHGILW

SEQ ID NO: 1638 - protein, 9 aa, synthetic construct
DGREKCFRE

SEQ ID NO: 1639 - protein, 9 aa, synthetic construct
DGTGRGLTL

SEQ ID NO: 1640 - protein, 9 aa, synthetic construct
DGGSGCGKN

SEQ ID NO: 1641 - protein, 9 aa, synthetic construct
DGGRNVGGF

SEQ ID NO: 1642 - protein, 9 aa, synthetic construct
DGMSFCNKM

SEQ ID NO: 1643 - protein, 9 aa, synthetic construct
DGGRAGNSG

SEQ ID NO: 1644 - protein, 9 aa, synthetic construct
DGSNGCITE

SEQ ID NO: 1645 - protein, 9 aa, synthetic construct
DGQYTEWKH

SEQ ID NO: 1646 - protein, 9 aa, synthetic construct
DGLKALGLN

SEQ ID NO: 1647 - protein, 9 aa, synthetic construct
DGTCCNPLP

SEQ ID NO: 1648 - protein, 9 aa, synthetic construct
DGYAPLGRA

SEQ ID NO: 1649 - protein, 9 aa, synthetic construct
DGRLDRYTS

SEQ ID NO: 1650 - protein, 9 aa, synthetic construct
DGILVFLDL

SEQ ID NO: 1651 - protein, 9 aa, synthetic construct
DGDLLGGPL

SEQ ID NO: 1652 - protein, 9 aa, synthetic construct
DGRSKDFDT

SEQ ID NO: 1653 - protein, 9 aa, synthetic construct
DGAKGFDVH

SEQ ID NO: 1654 - protein, 9 aa, synthetic construct
DGRVRRLGS

SEQ ID NO: 1655 - protein, 9 aa, synthetic construct
DGLWVHARL

SEQ ID NO: 1656 - protein, 9 aa, synthetic construct
DGARARRCG

SEQ ID NO: 1657 - protein, 9 aa, synthetic construct
DGPMGWELA

SEQ ID NO: 1658 - protein, 9 aa, synthetic construct
DGRILGLMT

SEQ ID NO: 1659 - protein, 9 aa, synthetic construct
DGHHGNEPW

SEQ ID NO: 1660 - protein, 9 aa, synthetic construct
DGGSRCGAL

SEQ ID NO: 1661 - protein, 9 aa, synthetic construct
DGCKRAQES

SEQ ID NO: 1662 - protein, 9 aa, synthetic construct
DGPYGIMGS

SEQ ID NO: 1663 - protein, 9 aa, synthetic construct
DGPTGYLVK

SEQ ID NO: 1664 - protein, 9 aa, synthetic construct
DGRSNDLCD

SEQ ID NO: 1665 - protein, 9 aa, synthetic construct
DGLRPSDIR

SEQ ID NO: 1666 - protein, 9 aa, synthetic construct
DGYERFEPG

SEQ ID NO: 1667 - protein, 9 aa, synthetic construct
DGSIRRFVC

SEQ ID NO: 1668 - protein, 9 aa, synthetic construct
DGIVNFNVR

SEQ ID NO: 1669 - protein, 9 aa, synthetic construct
DGLGRPLVS

SEQ ID NO: 1670 - protein, 9 aa, synthetic construct
DGDSQPWKL

SEQ ID NO: 1671 - protein, 9 aa, synthetic construct
DGKSRCTDN

SEQ ID NO: 1672 - protein, 9 aa, synthetic construct
DGSCAPGAM

SEQ ID NO: 1673 - protein, 9 aa, synthetic construct
DGNIPRSAG

SEQ ID NO: 1674 - protein, 9 aa, synthetic construct
DGVGTSRMF

SEQ ID NO: 1675 - protein, 9 aa, synthetic construct
DGFNWLKCY

SEQ ID NO: 1676 - protein, 9 aa, synthetic construct
DGLFCLKTL

SEQ ID NO: 1677 - protein, 9 aa, synthetic construct
DGGRGLGVL

SEQ ID NO: 1678 - protein, 9 aa, synthetic construct
DGRIIFQVK

SEQ ID NO: 1679 - protein, 9 aa, synthetic construct
DGDLHYVKS

SEQ ID NO: 1680 - protein, 9 aa, synthetic construct
DGWACPRSR

SEQ ID NO: 1681 - protein, 9 aa, synthetic construct
DGDQSDLTW

SEQ ID NO: 1682 - protein, 9 aa, synthetic construct
DGFLNCSMT

SEQ ID NO: 1683 - protein, 9 aa, synthetic construct
DGYLSEYVR

SEQ ID NO: 1684 - protein, 9 aa, synthetic construct
DGVWLNMVP

SEQ ID NO: 1685 - protein, 9 aa, synthetic construct
DGYLWYRDD

SEQ ID NO: 1686 - protein, 9 aa, synthetic construct
DGGAPEGIR

SEQ ID NO: 1687 - protein, 9 aa, synthetic construct
DGEKTPGIL

SEQ ID NO: 1688 - protein, 9 aa, synthetic construct
DGLDFYSIS

SEQ ID NO: 1689 - protein, 9 aa, synthetic construct
DGWVRSSVL

SEQ ID NO: 1690 - protein, 9 aa, synthetic construct
DGLHHTPCG

SEQ ID NO: 1691 - protein, 9 aa, synthetic construct
DGSGKRGIY

SEQ ID NO: 1692 - protein, 9 aa, synthetic construct
DGNEPRCRV

SEQ ID NO: 1693 - protein, 9 aa, synthetic construct
DGRGKEKND

SEQ ID NO: 1694 - protein, 9 aa, synthetic construct
DGNECSEVE

SEQ ID NO: 1695 - protein, 9 aa, synthetic construct
DGKKNMSGF

SEQ ID NO: 1696 - protein, 9 aa, synthetic construct
DGFDCRWSM

SEQ ID NO: 1697 - protein, 9 aa, synthetic construct
DGNSPRACS

SEQ ID NO: 1698 - protein, 9 aa, synthetic construct
DGNSNTFPA

SEQ ID NO: 1699 - protein, 9 aa, synthetic construct
DGADLGRRH

SEQ ID NO: 1700 - protein, 9 aa, synthetic construct
DGLVNRIYG

SEQ ID NO: 1701 - protein, 9 aa, synthetic construct
DGFVDVAAG

SEQ ID NO: 1702 - protein, 9 aa, synthetic construct
DGWSCSLKR

SEQ ID NO: 1703 - protein, 9 aa, synthetic construct
DGTLVIKTC

SEQ ID NO: 1704 - protein, 9 aa, synthetic construct
DGPRTSEYC

SEQ ID NO: 1705 - protein, 9 aa, synthetic construct
DGRGPSVGC

SEQ ID NO: 1706 - protein, 9 aa, synthetic construct
DGSQSGLVV

SEQ ID NO: 1707 - protein, 9 aa, synthetic construct
DGRGNADIR

SEQ ID NO: 1708 - protein, 9 aa, synthetic construct
DGRCMTGIT

SEQ ID NO: 1709 - protein, 9 aa, synthetic construct
DGAGPSCVN

SEQ ID NO: 1710 - protein, 9 aa, synthetic construct
DGEVNVGGH

SEQ ID NO: 1711 - protein, 9 aa, synthetic construct
DGRDRKSCN

SEQ ID NO: 1712 - protein, 9 aa, synthetic construct
DGNNIVVFD

SEQ ID NO: 1713 - protein, 9 aa, synthetic construct
DGLWQEILD

SEQ ID NO: 1714 - protein, 9 aa, synthetic construct
DGNNHCRVY

SEQ ID NO: 1715 - protein, 9 aa, synthetic construct
DGHPGVTKG

SEQ ID NO: 1716 - protein, 9 aa, synthetic construct
DGCMVSGQD

SEQ ID NO: 1717 - protein, 9 aa, synthetic construct
DGGHNCLGY

SEQ ID NO: 1718 - protein, 9 aa, synthetic construct
DGRPAGVDS

SEQ ID NO: 1719 - protein, 9 aa, synthetic construct
AQSVTPKNQ

SEQ ID NO: 1720 - protein, 9 aa, synthetic construct
AQSMLKLGE

SEQ ID NO: 1721 - protein, 9 aa, synthetic construct
DGDYRTVKQ

SEQ ID NO: 1722 - protein, 9 aa, synthetic construct
AQYPPVFKS

SEQ ID NO: 1723 - protein, 9 aa, synthetic construct
AQELKVKQQ

SEQ ID NO: 1724 - protein, 9 aa, synthetic construct
AQWTLNQTS

SEQ ID NO: 1725 - protein, 9 aa, synthetic construct
AQALPSHHS

SEQ ID NO: 1726 - protein, 9 aa, synthetic construct
AQKRAGPST

SEQ ID NO: 1727 - protein, 9 aa, synthetic construct
AQQVIKGGE

SEQ ID NO: 1728 - protein, 9 aa, synthetic construct
AQTVLRSGE

SEQ ID NO: 1729 - protein, 9 aa, synthetic construct
AQQSPIQSL

SEQ ID NO: 1730 - protein, 9 aa, synthetic construct
AQSVIGMSG

SEQ ID NO: 1731 - protein, 9 aa, synthetic construct
DGQSVVKLG

SEQ ID NO: 1732 - protein, 9 aa, synthetic construct
AQSPVGLGE

SEQ ID NO: 1733 - protein, 9 aa, synthetic construct
AQTFNNQLD

SEQ ID NO: 1734 - protein, 9 aa, synthetic construct
DGSGPIRMG

SEQ ID NO: 1735 - protein, 9 aa, synthetic construct
AQAMVGMGV

SEQ ID NO: 1736 - protein, 9 aa, synthetic construct
AQSVVGLGA

SEQ ID NO: 1737 - protein, 9 aa, synthetic construct
AQTVVGMGI

SEQ ID NO: 1738 - protein, 9 aa, synthetic construct
AQSTVMQIS

SEQ ID NO: 1739 - protein, 9 aa, synthetic construct
AQHTLSQMS

SEQ ID NO: 1740 - protein, 9 aa, synthetic construct
AQRKEKERW

SEQ ID NO: 1741 - protein, 9 aa, synthetic construct
AQSITGLGY

SEQ ID NO: 1742 - protein, 9 aa, synthetic construct
AQFATMQVS

SEQ ID NO: 1743 - protein, 9 aa, synthetic construct
DGQDPVRKT

SEQ ID NO: 1744 - protein, 9 aa, synthetic construct
AQSSSRLCL

SEQ ID NO: 1745 - protein, 9 aa, synthetic construct
AQKYGKYTS

SEQ ID NO: 1746 - protein, 9 aa, synthetic construct
AQIVTNQYG

SEQ ID NO: 1747 - protein, 9 aa, synthetic construct
AQAMVQMLG

SEQ ID NO: 1748 - protein, 9 aa, synthetic construct
AQMMVGLGQ

SEQ ID NO: 1749 - protein, 9 aa, synthetic construct
AQTVQIQTY

SEQ ID NO: 1750 - protein, 9 aa, synthetic construct
AQEGSFPRR

SEQ ID NO: 1751 - protein, 9 aa, synthetic construct
AQGYGKRTY

SEQ ID NO: 1752 - protein, 9 aa, synthetic construct
AQSIMRLGE

SEQ ID NO: 1753 - protein, 9 aa, synthetic construct
AQGMIGMGS

SEQ ID NO: 1754 - protein, 9 aa, synthetic construct
AQTVLHMGE

SEQ ID NO: 1755 - protein, 9 aa, synthetic construct
DGVWLNIET

SEQ ID NO: 1756 - protein, 9 aa, synthetic construct
AQSIVRLGD

SEQ ID NO: 1757 - protein, 9 aa, synthetic construct
AQSIFRNGE

SEQ ID NO: 1758 - protein, 9 aa, synthetic construct
AQTVVQYGE

SEQ ID NO: 1759 - protein, 9 aa, synthetic construct
AQKPTKLGE

SEQ ID NO: 1760 - protein, 9 aa, synthetic construct
DGGGSMSTW

SEQ ID NO: 1761 - protein, 9 aa, synthetic construct
AQGPIRDGA

SEQ ID NO: 1762 - protein, 9 aa, synthetic construct
DGVVGHVKG

SEQ ID NO: 1763 - protein, 9 aa, synthetic construct
DGFRFQDRD

SEQ ID NO: 1764 - protein, 9 aa, synthetic construct
DGDNYVTKP

SEQ ID NO: 1765 - protein, 9 aa, synthetic construct
DGKDGHWKP

SEQ ID NO: 1766 - protein, 9 aa, synthetic construct
AQSVVKLGT

SEQ ID NO: 1767 - protein, 9 aa, synthetic construct
DGRVTREFD

SEQ ID NO: 1768 - protein, 9 aa, synthetic construct
AQGKYTAWE

SEQ ID NO: 1769 - protein, 9 aa, synthetic construct
AQTVVKLGS

SEQ ID NO: 1770 - protein, 9 aa, synthetic construct
AQSVVKMSD

SEQ ID NO: 1771 - protein, 9 aa, synthetic construct
AQSVHYQVS

SEQ ID NO: 1772 - protein, 9 aa, synthetic construct
DGKTGIMKP

SEQ ID NO: 1773 - protein, 9 aa, synthetic construct
AQIICSSVR

SEQ ID NO: 1774 - protein, 9 aa, synthetic construct
DGLSPGRFL

SEQ ID NO: 1775 - protein, 9 aa, synthetic construct
AQNVLQMGK

SEQ ID NO: 1776 - protein, 9 aa, synthetic construct
AQSTTAQYN

SEQ ID NO: 1777 - protein, 9 aa, synthetic construct
DGLIYEYEH

SEQ ID NO: 1778 - protein, 9 aa, synthetic construct
DGDNRVTRE

SEQ ID NO: 1779 - protein, 9 aa, synthetic construct
AQMPIRDGQ

SEQ ID NO: 1780 - protein, 9 aa, synthetic construct
AQTVVAQKA

SEQ ID NO: 1781 - protein, 9 aa, synthetic construct
DGDNYILKG

SEQ ID NO: 1782 - protein, 9 aa, synthetic construct
AQHFPRMVD

SEQ ID NO: 1783 - protein, 9 aa, synthetic construct
DGSHMLLHV

SEQ ID NO: 1784 - protein, 9 aa, synthetic construct
DGDFYLLKP

SEQ ID NO: 1785 - protein, 9 aa, synthetic construct
DGKYEPPAC

SEQ ID NO: 1786 - protein, 9 aa, synthetic construct
AQGTYMATD

SEQ ID NO: 1787 - protein, 9 aa, synthetic construct
AQGMIKGGS

SEQ ID NO: 1788 - protein, 9 aa, synthetic construct
AQSTTWQTS

SEQ ID NO: 1789 - protein, 9 aa, synthetic construct
DGDGYLYKG

SEQ ID NO: 1790 - protein, 9 aa, synthetic construct
AQYRNGGAS

SEQ ID NO: 1791 - protein, 9 aa, synthetic construct
DGDEYFERP

SEQ ID NO: 1792 - protein, 9 aa, synthetic construct
DGKVGQTKT

SEQ ID NO: 1793 - protein, 9 aa, synthetic construct
DGKRGMDKP

SEQ ID NO: 1794 - protein, 9 aa, synthetic construct
DGFIYDYKH

SEQ ID NO: 1795 - protein, 9 aa, synthetic construct
DGLNWHTID

SEQ ID NO: 1796 - protein, 9 aa, synthetic construct
DGKAGVMKA

SEQ ID NO: 1797 - protein, 9 aa, synthetic construct
AQGKYSGIE

SEQ ID NO: 1798 - protein, 9 aa, synthetic construct
AQGVVAYLT

SEQ ID NO: 1799 - protein, 9 aa, synthetic construct
DGDNYHVPP

SEQ ID NO: 1800 - protein, 9 aa, synthetic construct
AQGDSLPYR

SEQ ID NO: 1801 - protein, 9 aa, synthetic construct
AQWPTSYDD

SEQ ID NO: 1802 - protein, 9 aa, synthetic construct
DGILGLFKG

SEQ ID NO: 1803 - protein, 9 aa, synthetic construct
AQLVAGRDL

SEQ ID NO: 1804 - protein, 9 aa, synthetic construct
DGDNYFLKV

SEQ ID NO: 1805 - protein, 9 aa, synthetic construct
DGDNYLLKT

SEQ ID NO: 1806 - protein, 9 aa, synthetic construct
DGVPGHHKS

SEQ ID NO: 1807 - protein, 9 aa, synthetic construct
DGGKYTYTE

SEQ ID NO: 1808 - protein, 9 aa, synthetic construct
AQGVIGIKG

SEQ ID NO: 1809 - protein, 9 aa, synthetic construct
AQERCCPLV

SEQ ID NO: 1810 - protein, 9 aa, synthetic construct
AQSKYTAND

SEQ ID NO: 1811 - protein, 9 aa, synthetic construct
DGGVVAIYR

SEQ ID NO: 1812 - protein, 9 aa, synthetic construct
DGFSHAALW

SEQ ID NO: 1813 - protein, 9 aa, synthetic construct
AQVVCNSIK

SEQ ID NO: 1814 - protein, 9 aa, synthetic construct
AQLTRALLR

SEQ ID NO: 1815 - protein, 9 aa, synthetic construct
DGDNYRTKG

SEQ ID NO: 1816 - protein, 9 aa, synthetic construct
AQSGPIRMG

SEQ ID NO: 1817 - protein, 9 aa, synthetic construct
DGDNYSHLP

SEQ ID NO: 1818 - protein, 9 aa, synthetic construct
DGDKYFYKE

SEQ ID NO: 1819 - protein, 9 aa, synthetic construct
DGDNYKYVG

SEQ ID NO: 1820 - protein, 9 aa, synthetic construct
AQKVTGFGS

SEQ ID NO: 1821 - protein, 9 aa, synthetic construct
AQCVSLCSA

SEQ ID NO: 1822 - protein, 9 aa, synthetic construct
DGDDYFVKE

SEQ ID NO: 1823 - protein, 9 aa, synthetic construct
AQGKYTHND

SEQ ID NO: 1824 - protein, 9 aa, synthetic construct
AQGRYVPGD

SEQ ID NO: 1825 - protein, 9 aa, synthetic construct
DGRAGQNKG

SEQ ID NO: 1826 - protein, 9 aa, synthetic construct
AQSVVRLGV

SEQ ID NO: 1827 - protein, 9 aa, synthetic construct
DGLSLWVSG

SEQ ID NO: 1828 - protein, 9 aa, synthetic construct
DGDNYLIKK

SEQ ID NO: 1829 - protein, 9 aa, synthetic construct
AQVICSNTV

SEQ ID NO: 1830 - protein, 9 aa, synthetic construct
AQTPIRMGP

SEQ ID NO: 1831 - protein, 9 aa, synthetic construct
DGCNGIEFG

SEQ ID NO: 1832 - protein, 9 aa, synthetic construct
AQGVVRMAQ

SEQ ID NO: 1833 - protein, 9 aa, synthetic construct
DGLCNMFRY

SEQ ID NO: 1834 - protein, 9 aa, synthetic construct
DGKVGMIKL

SEQ ID NO: 1835 - protein, 9 aa, synthetic construct
AQGMYTYLD

SEQ ID NO: 1836 - protein, 9 aa, synthetic construct
AQMRPGPTD

SEQ ID NO: 1837 - protein, 9 aa, synthetic construct
AQLCIADWI

SEQ ID NO: 1838 - protein, 9 aa, synthetic construct
DGDYRVTKQ

SEQ ID NO: 1839 - protein, 9 aa, synthetic construct
DGLICSYNG

SEQ ID NO: 1840 - protein, 9 aa, synthetic construct
AQYYECSQQ

SEQ ID NO: 1841 - protein, 9 aa, synthetic construct
DGLDSVCPS

SEQ ID NO: 1842 - protein, 9 aa, synthetic construct
AQGNSILWL

SEQ ID NO: 1843 - protein, 9 aa, synthetic construct
AQVWRTSTS

SEQ ID NO: 1844 - protein, 9 aa, synthetic construct
AQGRYTSWA

SEQ ID NO: 1845 - protein, 9 aa, synthetic construct
AQVICSPAI

SEQ ID NO: 1846 - protein, 9 aa, synthetic construct
AQCVAAMKC

SEQ ID NO: 1847 - protein, 9 aa, synthetic construct
AQLICTTTN

SEQ ID NO: 1848 - protein, 9 aa, synthetic construct
DGCRCDMVC

SEQ ID NO: 1849 - protein, 9 aa, synthetic construct
AQSEKGYCL

SEQ ID NO: 1850 - protein, 9 aa, synthetic construct
DGTYCSQES

SEQ ID NO: 1851 - protein, 9 aa, synthetic construct
AQKMHVDRW

SEQ ID NO: 1852 - protein, 9 aa, synthetic construct
DGKSPHYKP

SEQ ID NO: 1853 - protein, 9 aa, synthetic construct
DGLKLISKG

SEQ ID NO: 1854 - protein, 9 aa, synthetic construct
AQGPVKMGF

SEQ ID NO: 1855 - protein, 9 aa, synthetic construct
DGHTCSPNT

SEQ ID NO: 1856 - protein, 9 aa, synthetic construct
AQSRCSDET

SEQ ID NO: 1857 - protein, 9 aa, synthetic construct
AQYYYLFNS

SEQ ID NO: 1858 - protein, 9 aa, synthetic construct
AQVYDLVFC

SEQ ID NO: 1859 - protein, 9 aa, synthetic construct
AQQNPIAVR

SEQ ID NO: 1860 - protein, 9 aa, synthetic construct
AQIVCDHRI

SEQ ID NO: 1861 - protein, 9 aa, synthetic construct
AQLLLTCLF

SEQ ID NO: 1862 - protein, 9 aa, synthetic construct
AQTAMEFDH

SEQ ID NO: 1863 - protein, 9 aa, synthetic construct
DGVVHETVR

SEQ ID NO: 1864 - protein, 9 aa, synthetic construct
DGGDINYNW

SEQ ID NO: 1865 - protein, 9 aa, synthetic construct
AQDKPGQVK

SEQ ID NO: 1866 - protein, 9 aa, synthetic construct
AQPSSLSYK

SEQ ID NO: 1867 - protein, 9 aa, synthetic construct
DGEVGLTVR

SEQ ID NO: 1868 - protein, 9 aa, synthetic construct
DGIVGSTIR

SEQ ID NO: 1869 - protein, 9 aa, synthetic construct
AQRETTAFI

SEQ ID NO: 1870 - protein, 9 aa, synthetic construct
DGVVGVNIR

SEQ ID NO: 1871 - protein, 9 aa, synthetic construct
AQTPVGLGE

SEQ ID NO: 1872 - protein, 9 aa, synthetic construct
AQRETNAFI

SEQ ID NO: 1873 - protein, 9 aa, synthetic construct
AQHNVMSTQ

SEQ ID NO: 1874 - protein, 9 aa, synthetic construct
DGIFGGGGK

SEQ ID NO: 1875 - protein, 9 aa, synthetic construct
AQRWKQEIE

SEQ ID NO: 1876 - protein, 9 aa, synthetic construct
AQLEYARSL

SEQ ID NO: 1877 - protein, 9 aa, synthetic construct
DGIKGGGSK

SEQ ID NO: 1878 - protein, 9 aa, synthetic construct
DGIVHLAVR

SEQ ID NO: 1879 - protein, 9 aa, synthetic construct
AQVICSSLI

SEQ ID NO: 1880 - protein, 9 aa, synthetic construct
DGFGFTLST

SEQ ID NO: 1881 - protein, 9 aa, synthetic construct
AQVICSYIV

SEQ ID NO: 1882 - protein, 9 aa, synthetic construct
DGRPYGPVL

SEQ ID NO: 1883 - protein, 9 aa, synthetic construct
AQKSAGFAS

SEQ ID NO: 1884 - protein, 9 aa, synthetic construct
AQTKSNGIS

SEQ ID NO: 1885 - protein, 9 aa, synthetic construct
AQERYTSHN

SEQ ID NO: 1886 - protein, 9 aa, synthetic construct
AQQDAKVTT

SEQ ID NO: 1887 - protein, 9 aa, synthetic construct
DGLCIADWI

SEQ ID NO: 1888 - protein, 9 aa, synthetic construct
DGVICSYIV

SEQ ID NO: 1889 - protein, 9 aa, synthetic construct
AQFYPSSSK

SEQ ID NO: 1890 - protein, 9 aa, synthetic construct
AQTMLRMGE

SEQ ID NO: 1891 - protein, 9 aa, synthetic construct
DGNEVVWRV

SEQ ID NO: 1892 - protein, 9 aa, synthetic construct
AQKISVMYE

SEQ ID NO: 1893 - protein, 9 aa, synthetic construct
AQTISHQIS

SEQ ID NO: 1894 - protein, 9 aa, synthetic construct
DGLTYYGIE

SEQ ID NO: 1895 - protein, 9 aa, synthetic construct
AQQDGVAEG

SEQ ID NO: 1896 - protein, 9 aa, synthetic construct
DGAPFGPAI

SEQ ID NO: 1897 - protein, 9 aa, synthetic construct
AQSVLSQVS

SEQ ID NO: 1898 - protein, 9 aa, synthetic construct
DGVWLNLSS

SEQ ID NO: 1899 - protein, 9 aa, synthetic construct
AQSVSTGIS

SEQ ID NO: 1900 - protein, 9 aa, synthetic construct
AQSPFKEGL

SEQ ID NO: 1901 - protein, 9 aa, synthetic construct
AQTVLFQQS

SEQ ID NO: 1902 - protein, 9 aa, synthetic construct
AQCGSGHIE

SEQ ID NO: 1903 - protein, 9 aa, synthetic construct
DGQSPIMRM

SEQ ID NO: 1904 - protein, 9 aa, synthetic construct
AQTWDTGIS

SEQ ID NO: 1905 - protein, 9 aa, synthetic construct
AQTVLFQVE

SEQ ID NO: 1906 - protein, 9 aa, synthetic construct
DGHGGGSRY

SEQ ID NO: 1907 - protein, 9 aa, synthetic construct
AQTTLSQQS

SEQ ID NO: 1908 - protein, 9 aa, synthetic construct
AQTVNYQVT

SEQ ID NO: 1909 - protein, 9 aa, synthetic construct
AQVICSSVV

SEQ ID NO: 1910 - protein, 9 aa, synthetic construct
DGNLSMRSE

SEQ ID NO: 1911 - protein, 9 aa, synthetic construct
AQPMLDRNT

SEQ ID NO: 1912 - protein, 9 aa, synthetic construct
AQTTLSQVT

SEQ ID NO: 1913 - protein, 9 aa, synthetic construct
DGIAEEDWM

SEQ ID NO: 1914 - protein, 9 aa, synthetic construct
AQNQSPVGF

SEQ ID NO: 1915 - protein, 9 aa, synthetic construct
DGMGPIRMS

SEQ ID NO: 1916 - protein, 9 aa, synthetic construct
AQVICMGII

SEQ ID NO: 1917 - protein, 9 aa, synthetic construct
AQHTTHQVS

SEQ ID NO: 1918 - protein, 9 aa, synthetic construct
DGLRATSPS

SEQ ID NO: 1919 - protein, 9 aa, synthetic construct
AQTIWSGDM

SEQ ID NO: 1920 - protein, 9 aa, synthetic construct
AQENDMVFF

SEQ ID NO: 1921 - protein, 9 aa, synthetic construct
DGLLEYTFR

SEQ ID NO: 1922 - protein, 9 aa, synthetic construct
AQTVLHQTH

SEQ ID NO: 1923 - protein, 9 aa, synthetic construct
AQSISTGIY

SEQ ID NO: 1924 - protein, 9 aa, synthetic construct
AQTTVHQSS

SEQ ID NO: 1925 - protein, 9 aa, synthetic construct
AQTTLQQIT

SEQ ID NO: 1926 - protein, 9 aa, synthetic construct
AQIICSSLR

SEQ ID NO: 1927 - protein, 9 aa, synthetic construct
AQTVNFQIT

SEQ ID NO: 1928 - protein, 9 aa, synthetic construct
DGVPSVDIR

SEQ ID NO: 1929 - protein, 9 aa, synthetic construct
AQFIASHNV

SEQ ID NO: 1930 - protein, 9 aa, synthetic construct
DGCQPPKCI

SEQ ID NO: 1931 - protein, 9 aa, synthetic construct
AQVVCSHTL

SEQ ID NO: 1932 - protein, 9 aa, synthetic construct
AQGVIRMGD

SEQ ID NO: 1933 - protein, 9 aa, synthetic construct
AQLICYDKN

SEQ ID NO: 1934 - protein, 9 aa, synthetic construct
AQDYPFVDP

SEQ ID NO: 1935 - protein, 9 aa, synthetic construct
DGTQSPTSW

SEQ ID NO: 1936 - protein, 9 aa, synthetic construct
AQSVTKLGA

SEQ ID NO: 1937 - protein, 9 aa, synthetic construct
AQTRFIEPY

SEQ ID NO: 1938 - protein, 9 aa, synthetic construct
AQILRIEPT

SEQ ID NO: 1939 - protein, 9 aa, synthetic construct
AQEHTSELQ

SEQ ID NO: 1940 - protein, 9 aa, synthetic construct
DGVVCSYNR

SEQ ID NO: 1941 - protein, 9 aa, synthetic construct
AQVVCSGVI

SEQ ID NO: 1942 - protein, 9 aa, synthetic construct
AQPVDYKPW

SEQ ID NO: 1943 - protein, 9 aa, synthetic construct
AQLVCSHLR

SEQ ID NO: 1944 - protein, 9 aa, synthetic construct
AQNPVRNGA

SEQ ID NO: 1945 - protein, 9 aa, synthetic construct
AQTVTKQIN

SEQ ID NO: 1946 - protein, 9 aa, synthetic construct
AQGRYTASE

SEQ ID NO: 1947 - protein, 9 aa, synthetic construct
AQSMVKGGS

SEQ ID NO: 1948 - protein, 9 aa, synthetic construct
DGKTGLSKP

SEQ ID NO: 1949 - protein, 9 aa, synthetic construct
AQGFDPNNR

SEQ ID NO: 1950 - protein, 9 aa, synthetic construct
AQTTFLQID

SEQ ID NO: 1951 - protein, 9 aa, synthetic construct
AQTMVKGGP

SEQ ID NO: 1952 - protein, 9 aa, synthetic construct
AQTVVKMGV

SEQ ID NO: 1953 - protein, 9 aa, synthetic construct
AQVICSSVM

SEQ ID NO: 1954 - protein, 9 aa, synthetic construct
AQLSAFTSA

SEQ ID NO: 1955 - protein, 9 aa, synthetic construct
AQNPTKMGM

SEQ ID NO: 1956 - protein, 9 aa, synthetic construct
DGFGITWTE

SEQ ID NO: 1957 - protein, 9 aa, synthetic construct
AQGQSLSYM

SEQ ID NO: 1958 - protein, 9 aa, synthetic construct
AQTFVSHNI

SEQ ID NO: 1959 - protein, 9 aa, synthetic construct
AQSVVRDKG

SEQ ID NO: 1960 - protein, 9 aa, synthetic construct
AQSIHSHNT

SEQ ID NO: 1961 - protein, 9 aa, synthetic construct
DGMVAEWVG

SEQ ID NO: 1962 - protein, 9 aa, synthetic construct
AQSMVKGGP

SEQ ID NO: 1963 - protein, 9 aa, synthetic construct
DGGSYKIIV

SEQ ID NO: 1964 - protein, 9 aa, synthetic construct
AQTRMSGIS

SEQ ID NO: 1965 - protein, 9 aa, synthetic construct
AQGRQDCSD

SEQ ID NO: 1966 - protein, 9 aa, synthetic construct
AQSTTYQFS

SEQ ID NO: 1967 - protein, 9 aa, synthetic construct
AQEVGLTVR

SEQ ID NO: 1968 - protein, 9 aa, synthetic construct
AQDGSLTFR

SEQ ID NO: 1969 - protein, 9 aa, synthetic construct
AQGKYAAIC

SEQ ID NO: 1970 - protein, 9 aa, synthetic construct
AQKDGHNKG

SEQ ID NO: 1971 - protein, 9 aa, synthetic construct
AQGVQRRMH

SEQ ID NO: 1972 - protein, 9 aa, synthetic construct
AQELKGKCG

SEQ ID NO: 1973 - protein, 9 aa, synthetic construct
AQMDGLWKG

SEQ ID NO: 1974 - protein, 9 aa, synthetic construct
AQCKPLNSR

SEQ ID NO: 1975 - protein, 9 aa, synthetic construct
AQSYKEYNL

SEQ ID NO: 1976 - protein, 9 aa, synthetic construct
AQLICDYRI

SEQ ID NO: 1977 - protein, 9 aa, synthetic construct
AQTVRNQVS

SEQ ID NO: 1978 - protein, 9 aa, synthetic construct
AQPRLGLAA

SEQ ID NO: 1979 - protein, 9 aa, synthetic construct
AQVICANTR

SEQ ID NO: 1980 - protein, 9 aa, synthetic construct
DGSLIFGMR

SEQ ID NO: 1981 - protein, 9 aa, synthetic construct
AQVLCTTLK

SEQ ID NO: 1982 - protein, 9 aa, synthetic construct
AQNVIKLGM

SEQ ID NO: 1983 - protein, 9 aa, synthetic construct
DGTVFFICL

SEQ ID NO: 1984 - protein, 9 aa, synthetic construct
AQGICATQR

SEQ ID NO: 1985 - protein, 9 aa, synthetic construct
AQVICTNVR

SEQ ID NO: 1986 - protein, 9 aa, synthetic construct
AQESLSSAQ

SEQ ID NO: 1987 - protein, 9 aa, synthetic construct
AQTKGSGIS

SEQ ID NO: 1988 - protein, 9 aa, synthetic construct
AQSVTKFGA

SEQ ID NO: 1989 - protein, 9 aa, synthetic construct
AQTTLRQVT

SEQ ID NO: 1990 - protein, 9 aa, synthetic construct
DGRIGHSKP

SEQ ID NO: 1991 - protein, 9 aa, synthetic construct
AQDRPLYVY

SEQ ID NO: 1992 - protein, 9 aa, synthetic construct
DGDWPYCVF

SEQ ID NO: 1993 - protein, 9 aa, synthetic construct
AQLVEGHWK

SEQ ID NO: 1994 - protein, 9 aa, synthetic construct
AQCGLGANC

SEQ ID NO: 1995 - protein, 9 aa, synthetic construct
AQTVISQRS

SEQ ID NO: 1996 - protein, 9 aa, synthetic construct
AQSPVKLGY

SEQ ID NO: 1997 - protein, 9 aa, synthetic construct
AQQHVNLFV

SEQ ID NO: 1998 - protein, 9 aa, synthetic construct
AQLYVNELR

SEQ ID NO: 1999 - protein, 9 aa, synthetic construct
AQLVNYSML

SEQ ID NO: 2000 - protein, 9 aa, synthetic construct
AQTTLSQRT

SEQ ID NO: 2001 - protein, 9 aa, synthetic construct
DGRLWLGGV

SEQ ID NO: 2002 - protein, 9 aa, synthetic construct
AQGSSLPFK

SEQ ID NO: 2003 - protein, 9 aa, synthetic construct
AQTLQYQKS

SEQ ID NO: 2004 - protein, 9 aa, synthetic construct
AQTKIYSKS

SEQ ID NO: 2005 - protein, 9 aa, synthetic construct
AQRSMFSHG

SEQ ID NO: 2006 - protein, 9 aa, synthetic construct
AQGNSLKYT

SEQ ID NO: 2007 - protein, 9 aa, synthetic construct
DGHDYCHFF

SEQ ID NO: 2008 - protein, 9 aa, synthetic construct
DGMCNAMIP

SEQ ID NO: 2009 - protein, 9 aa, synthetic construct
AQTRVFTVI

SEQ ID NO: 2010 - protein, 9 aa, synthetic construct
DGPIIERFV

SEQ ID NO: 2011 - protein, 9 aa, synthetic construct
AQFYTSHNT

SEQ ID NO: 2012 - protein, 9 aa, synthetic construct
DGLRCSNQF

SEQ ID NO: 2013 - protein, 9 aa, synthetic construct
AQLNSLSFK

SEQ ID NO: 2014 - protein, 9 aa, synthetic construct
AQMLPSYVR

SEQ ID NO: 2015 - protein, 9 aa, synthetic construct
AQQNSLSFK

SEQ ID NO: 2016 - protein, 9 aa, synthetic construct
AQEYTVPRW

SEQ ID NO: 2017 - protein, 9 aa, synthetic construct
AQTRWHGNE

SEQ ID NO: 2018 - protein, 9 aa, synthetic construct
AQNYLDYCA

SEQ ID NO: 2019 - protein, 9 aa, synthetic construct
AQSRSLSSL

SEQ ID NO: 2020 - protein, 9 aa, synthetic construct
AQMICTYVK

SEQ ID NO: 2021 - protein, 9 aa, synthetic construct
DGWSCCGRR

SEQ ID NO: 2022 - protein, 9 aa, synthetic construct
AQLNRLPHL

SEQ ID NO: 2023 - protein, 9 aa, synthetic construct
AQKLSSHNT

SEQ ID NO: 2024 - protein, 9 aa, synthetic construct
AQTKQLGIY

SEQ ID NO: 2025 - protein, 9 aa, synthetic construct
DGGVTWLRM

SEQ ID NO: 2026 - protein, 9 aa, synthetic construct
AQNLSLAYK

SEQ ID NO: 2027 - protein, 9 aa, synthetic construct
AQKYSLSSM

SEQ ID NO: 2028 - protein, 9 aa, synthetic construct
AQVYEVPRW

SEQ ID NO: 2029 - protein, 9 aa, synthetic construct
AQPWLPDNL

SEQ ID NO: 2030 - protein, 9 aa, synthetic construct
AQNNSLSYR

SEQ ID NO: 2031 - protein, 9 aa, synthetic construct
AQGKSLAWT

SEQ ID NO: 2032 - protein, 9 aa, synthetic construct
AQLNDIRRH

SEQ ID NO: 2033 - protein, 9 aa, synthetic construct
AQFKIYAAQ

SEQ ID NO: 2034 - protein, 9 aa, synthetic construct
DGGAYWSLF

SEQ ID NO: 2035 - protein, 9 aa, synthetic construct
AQINDLRRY

SEQ ID NO: 2036 - protein, 9 aa, synthetic construct
AQKVYTGIS

SEQ ID NO: 2037 - protein, 9 aa, synthetic construct
AQRMVIPSH

SEQ ID NO: 2038 - protein, 9 aa, synthetic construct
AQGSSMMYK

SEQ ID NO: 2039 - protein, 9 aa, synthetic construct
AQGMSLKYQ

SEQ ID NO: 2040 - protein, 9 aa, synthetic construct
AQRIHLSSI

SEQ ID NO: 2041 - protein, 9 aa, synthetic construct
AQNHQISGS

SEQ ID NO: 2042 - protein, 9 aa, synthetic construct
AQGKAANNA

SEQ ID NO: 2043 - protein, 9 aa, synthetic construct
DGIYSCPSG

SEQ ID NO: 2044 - protein, 9 aa, synthetic construct
AQTFGNPVS

SEQ ID NO: 2045 - protein, 9 aa, synthetic construct
AQRIMSHNV

SEQ ID NO: 2046 - protein, 9 aa, synthetic construct
AQYPAISFK

SEQ ID NO: 2047 - protein, 9 aa, synthetic construct
DGVVGSTVR

SEQ ID NO: 2048 - protein, 9 aa, synthetic construct
DGIVSSTVR

SEQ ID NO: 2049 - protein, 9 aa, synthetic construct
DGIPHSTIR

SEQ ID NO: 2050 - protein, 9 aa, synthetic construct
DGIVGINIR

SEQ ID NO: 2051 - protein, 9 aa, synthetic construct
DGIVHMIVR

SEQ ID NO: 2052 - protein, 9 aa, synthetic construct
DGIVHLNIR

SEQ ID NO: 2053 - protein, 9 aa, synthetic construct
DGIPLSTIR

SEQ ID NO: 2054 - protein, 9 aa, synthetic construct
DGEVGLTTR

SEQ ID NO: 2055 - protein, 9 aa, synthetic construct
DGIVDLAER

SEQ ID NO: 2056 - protein, 9 aa, synthetic construct
DGEVHETVR

SEQ ID NO: 2057 - protein, 9 aa, synthetic construct
DGEVFSTIR

SEQ ID NO: 2058 - protein, 9 aa, synthetic construct
DGYVGGTIR

SEQ ID NO: 2059 - protein, 9 aa, synthetic construct
AQDVTRQSG

SEQ ID NO: 2060 - protein, 9 aa, synthetic construct
AQSRSLSSL

SEQ ID NO: 2061 - protein, 9 aa, synthetic construct
AQSKDAKYP

SEQ ID NO: 2062 - protein, 9 aa, synthetic construct
AQDKPGQGK

SEQ ID NO: 2063 - protein, 9 aa, synthetic construct
AQLADAMQC

SEQ ID NO: 2064 - protein, 9 aa, synthetic construct
AQMFCRWVR

SEQ ID NO: 2065 - protein, 9 aa, synthetic construct
AQVRIRRLM

SEQ ID NO: 2066 - protein, 9 aa, synthetic construct
AQTRKTSPV

SEQ ID NO: 2067 - protein, 9 aa, synthetic construct
AQHVTAQTY

SEQ ID NO: 2068 - protein, 9 aa, synthetic construct
AQILVLLIR

SEQ ID NO: 2069 - protein, 9 aa, synthetic construct
AQLMPSTNL

SEQ ID NO: 2070 - protein, 9 aa, synthetic construct
AQRFTKLLK

SEQ ID NO: 2071 - protein, 9 aa, synthetic construct
AQSKRSLEL

SEQ ID NO: 2072 - protein, 9 aa, synthetic construct
AQQHSLSFK

SEQ ID NO: 2073 - protein, 9 aa, synthetic construct
AQIFTKNST

SEQ ID NO: 2074 - protein, 9 aa, synthetic construct
AQPGNGKRG

SEQ ID NO: 2075 - protein, 9 aa, synthetic construct
AQIHKGIAI

SEQ ID NO: 2076 - protein, 9 aa, synthetic construct
AQSPLRPTD

SEQ ID NO: 2077 - protein, 9 aa, synthetic construct
AQNGMGGVS

SEQ ID NO: 2078 - protein, 9 aa, synthetic construct
AQQDSLRFK

SEQ ID NO: 2079 - protein, 9 aa, synthetic construct
AQDIKGMGI

SEQ ID NO: 2080 - protein, 9 aa, synthetic construct
AQMGLLRGP

SEQ ID NO: 2081 - protein, 9 aa, synthetic construct
AQNLRLPCL

SEQ ID NO: 2082 - protein, 9 aa, synthetic construct
AQTMIANGS

SEQ ID NO: 2083 - protein, 9 aa, synthetic construct
AQQKSLRFK

SEQ ID NO: 2084 - protein, 9 aa, synthetic construct
AQGDSLPYR

SEQ ID NO: 2085 - protein, 9 aa, synthetic construct
AQSNVMPCG

SEQ ID NO: 2086 - protein, 9 aa, synthetic construct
AQRAEPRTL

SEQ ID NO: 2087 - protein, 9 aa, synthetic construct
AQYDCYTED

SEQ ID NO: 2088 - protein, 9 aa, synthetic construct
AQSVVSMGR

SEQ ID NO: 2089 - protein, 9 aa, synthetic construct
AQAGGMGSK

SEQ ID NO: 2090 - protein, 9 aa, synthetic construct
AQSFISETA

SEQ ID NO: 2091 - protein, 9 aa, synthetic construct
AQFNSISSK

SEQ ID NO: 2092 - protein, 9 aa, synthetic construct
AQSSARSAS

SEQ ID NO: 2093 - protein, 9 aa, synthetic construct
AQRPTHVRD

SEQ ID NO: 2094 - protein, 9 aa, synthetic construct
AQGRRIVSN

SEQ ID NO: 2095 - protein, 9 aa, synthetic construct
AQELPYVSG

SEQ ID NO: 2096 - protein, 9 aa, synthetic construct
AQESSFTKE

SEQ ID NO: 2097 - protein, 9 aa, synthetic construct
AQMPRDGCA

SEQ ID NO: 2098 - protein, 9 aa, synthetic construct
AQNASGMSM

SEQ ID NO: 2099 - protein, 9 aa, synthetic construct
AQQRDDTVA

SEQ ID NO: 2100 - protein, 9 aa, synthetic construct
AQKNLRWGH

SEQ ID NO: 2101 - protein, 9 aa, synthetic construct
AQISNYPKR

SEQ ID NO: 2102 - protein, 9 aa, synthetic construct
AQLLVKELS

SEQ ID NO: 2103 - protein, 9 aa, synthetic construct
AQHSQLRGV

SEQ ID NO: 2104 - protein, 9 aa, synthetic construct
AQLRGLPSC

SEQ ID NO: 2105 - protein, 9 aa, synthetic construct
AQWRTMQRR

SEQ ID NO: 2106 - protein, 9 aa, synthetic construct
AQKDLGRDE

SEQ ID NO: 2107 - protein, 9 aa, synthetic construct
AQSMYQMGS

SEQ ID NO: 2108 - protein, 9 aa, synthetic construct
AQSPYKQGL

SEQ ID NO: 2109 - protein, 9 aa, synthetic construct
AQFPKGTIA

SEQ ID NO: 2110 - protein, 9 aa, synthetic construct
AQVRNRAGV

SEQ ID NO: 2111 - protein, 9 aa, synthetic construct
AQRSINDTR

SEQ ID NO: 2112 - protein, 9 aa, synthetic construct
AQLVVDSWT

SEQ ID NO: 2113 - protein, 9 aa, synthetic construct
AQKCVSIAA

SEQ ID NO: 2114 - protein, 9 aa, synthetic construct
AQTASSPRH

SEQ ID NO: 2115 - protein, 9 aa, synthetic construct
AQGVVSCRT

SEQ ID NO: 2116 - protein, 9 aa, synthetic construct
AQGKAYPVV

SEQ ID NO: 2117 - protein, 9 aa, synthetic construct
AQGESAFAT

SEQ ID NO: 2118 - protein, 9 aa, synthetic construct
AQHHRRSGM

SEQ ID NO: 2119 - protein, 9 aa, synthetic construct
AQTYNDYRA

SEQ ID NO: 2120 - protein, 9 aa, synthetic construct
AQEGVECNR

SEQ ID NO: 2121 - protein, 9 aa, synthetic construct
AQLVLKSSG

SEQ ID NO: 2122 - protein, 9 aa, synthetic construct
AQAQGSTHT

SEQ ID NO: 2123 - protein, 9 aa, synthetic construct
AQNIATNRS

SEQ ID NO: 2124 - protein, 9 aa, synthetic construct
AQTLSRTCL

SEQ ID NO: 2125 - protein, 9 aa, synthetic construct
AQDMRKTVF

SEQ ID NO: 2126 - protein, 9 aa, synthetic construct
AQKDRVIPN

SEQ ID NO: 2127 - protein, 9 aa, synthetic construct
AQTRPQPGT

SEQ ID NO: 2128 - protein, 9 aa, synthetic construct
AQVLSRMHC

SEQ ID NO: 2129 - protein, 9 aa, synthetic construct
AQWRSYVLD

SEQ ID NO: 2130 - protein, 9 aa, synthetic construct
AQNRLCKIT

SEQ ID NO: 2131 - protein, 9 aa, synthetic construct
AQRGAIVLG

SEQ ID NO: 2132 - protein, 9 aa, synthetic construct
AQVSCMSKL

SEQ ID NO: 2133 - protein, 9 aa, synthetic construct
AQCVSNAWQ

SEQ ID NO: 2134 - protein, 9 aa, synthetic construct
AQRQGSPSP

SEQ ID NO: 2135 - protein, 9 aa, synthetic construct
AQLKCGRTL

SEQ ID NO: 2136 - protein, 9 aa, synthetic construct
AQTSTLVFH

SEQ ID NO: 2137 - protein, 9 aa, synthetic construct
AQHMCDSRM

SEQ ID NO: 2138 - protein, 9 aa, synthetic construct
AQFKSLHCA

SEQ ID NO: 2139 - protein, 9 aa, synthetic construct
AQDVYTSRG

SEQ ID NO: 2140 - protein, 9 aa, synthetic construct
AQLLTVSEC

SEQ ID NO: 2141 - protein, 9 aa, synthetic construct
AQVECTTLM

SEQ ID NO: 2142 - protein, 9 aa, synthetic construct
AQLLFVFRM

SEQ ID NO: 2143 - protein, 9 aa, synthetic construct
AQACWPTFC

SEQ ID NO: 2144 - protein, 9 aa, synthetic construct
AQLCSLYEV

SEQ ID NO: 2145 - protein, 9 aa, synthetic construct
AQNPNASLN

SEQ ID NO: 2146 - protein, 9 aa, synthetic construct
AQMEVRACM

SEQ ID NO: 2147 - protein, 9 aa, synthetic construct
AQQACRSLI

SEQ ID NO: 2148 - protein, 9 aa, synthetic construct
AQTFVKMVE

SEQ ID NO: 2149 - protein, 9 aa, synthetic construct
AQLPAGTER

SEQ ID NO: 2150 - protein, 9 aa, synthetic construct
AQHFSTQMT

SEQ ID NO: 2151 - protein, 9 aa, synthetic construct
AQQNSLRLK

SEQ ID NO: 2152 - protein, 9 aa, synthetic construct
AQYVIIGKS

SEQ ID NO: 2153 - protein, 9 aa, synthetic construct
AQEGIDKET

SEQ ID NO: 2154 - protein, 9 aa, synthetic construct
AQTGCMAVD

SEQ ID NO: 2155 - protein, 9 aa, synthetic construct
AQGFHNMHG

SEQ ID NO: 2156 - protein, 9 aa, synthetic construct
AQTRSNATG

SEQ ID NO: 2157 - protein, 9 aa, synthetic construct
AQMVKCTVS

SEQ ID NO: 2158 - protein, 9 aa, synthetic construct
AQPLVASGR

SEQ ID NO: 2159 - protein, 9 aa, synthetic construct
AQTEHALCW

SEQ ID NO: 2160 - protein, 9 aa, synthetic construct
AQRMNDSNR

SEQ ID NO: 2161 - protein, 9 aa, synthetic construct
AQLVTRQTS

SEQ ID NO: 2162 - protein, 9 aa, synthetic construct
AQRYVQGGE

SEQ ID NO: 2163 - protein, 9 aa, synthetic construct
AQTNASCTY

SEQ ID NO: 2164 - protein, 9 aa, synthetic construct
AQILNLNKG

SEQ ID NO: 2165 - protein, 9 aa, synthetic construct
AQSRIGRGC

SEQ ID NO: 2166 - protein, 9 aa, synthetic construct
AQPAIFPEC

SEQ ID NO: 2167 - protein, 9 aa, synthetic construct
AQSASTISA

SEQ ID NO: 2168 - protein, 9 aa, synthetic construct
AQTTGSALP

SEQ ID NO: 2169 - protein, 9 aa, synthetic construct
AQRSMCTAE

SEQ ID NO: 2170 - protein, 9 aa, synthetic construct
AQNGETSRL

SEQ ID NO: 2171 - protein, 9 aa, synthetic construct
AQRTFRSNL

SEQ ID NO: 2172 - protein, 9 aa, synthetic construct
AQQPHLAAP

SEQ ID NO: 2173 - protein, 9 aa, synthetic construct
AQTGSPTIV

SEQ ID NO: 2174 - protein, 9 aa, synthetic construct
AQEFDRNNS

SEQ ID NO: 2175 - protein, 9 aa, synthetic construct
AQRVKKVPD

SEQ ID NO: 2176 - protein, 9 aa, synthetic construct
AQPYKANKF

SEQ ID NO: 2177 - protein, 9 aa, synthetic construct
AQSSSHLRS

SEQ ID NO: 2178 - protein, 9 aa, synthetic construct
AQNRLVSEL

SEQ ID NO: 2179 - protein, 9 aa, synthetic construct
AQPEKQACV

SEQ ID NO: 2180 - protein, 9 aa, synthetic construct
AQLSAFHEK

SEQ ID NO: 2181 - protein, 9 aa, synthetic construct
AQSTWPHVS

SEQ ID NO: 2182 - protein, 9 aa, synthetic construct
AQTSSPPTM

SEQ ID NO: 2183 - protein, 9 aa, synthetic construct
AQTQDFISK

SEQ ID NO: 2184 - protein, 9 aa, synthetic construct
AQGVVALGM

SEQ ID NO: 2185 - protein, 9 aa, synthetic construct
AQCVGRERD

SEQ ID NO: 2186 - protein, 9 aa, synthetic construct
AQCVMNVSC

SEQ ID NO: 2187 - protein, 9 aa, synthetic construct
AQFTSSQMN

SEQ ID NO: 2188 - protein, 9 aa, synthetic construct
AQKTCSSDT

SEQ ID NO: 2189 - protein, 9 aa, synthetic construct
AQKGHTAPG

SEQ ID NO: 2190 - protein, 9 aa, synthetic construct
AQLKAGAQA

SEQ ID NO: 2191 - protein, 9 aa, synthetic construct
AQSILASVP

SEQ ID NO: 2192 - protein, 9 aa, synthetic construct
AQFPSKNNS

SEQ ID NO: 2193 - protein, 9 aa, synthetic construct
AQLAGAVSR

SEQ ID NO: 2194 - protein, 9 aa, synthetic construct
AQGARMVRE

SEQ ID NO: 2195 - protein, 9 aa, synthetic construct
AQGTRLPAM

SEQ ID NO: 2196 - protein, 9 aa, synthetic construct
AQGVHGYSA

SEQ ID NO: 2197 - protein, 9 aa, synthetic construct
AQYPAATAI

SEQ ID NO: 2198 - protein, 9 aa, synthetic construct
AQGMRAATS

SEQ ID NO: 2199 - protein, 9 aa, synthetic construct
AQHRPPGAP

SEQ ID NO: 2200 - protein, 9 aa, synthetic construct
AQQSTRPAV

SEQ ID NO: 2201 - protein, 9 aa, synthetic construct
AQQDHGTKP

SEQ ID NO: 2202 - protein, 9 aa, synthetic construct
AQPIPGKSE

SEQ ID NO: 2203 - protein, 9 aa, synthetic construct
AQPTLPNRG

SEQ ID NO: 2204 - protein, 9 aa, synthetic construct
AQVWSDRGM

SEQ ID NO: 2205 - protein, 9 aa, synthetic construct
AQLAVSYKN

SEQ ID NO: 2206 - protein, 9 aa, synthetic construct
AQGSLRRGM

SEQ ID NO: 2207 - protein, 9 aa, synthetic construct
AQALNNQHR

SEQ ID NO: 2208 - protein, 9 aa, synthetic construct
AQQRHSYDS

SEQ ID NO: 2209 - protein, 9 aa, synthetic construct
AQGNVTKFF

SEQ ID NO: 2210 - protein, 9 aa, synthetic construct
AQKFAPSTT

SEQ ID NO: 2211 - protein, 9 aa, synthetic construct
AQMPSNSPN

SEQ ID NO: 2212 - protein, 9 aa, synthetic construct
AQRLHPLDA

SEQ ID NO: 2213 - protein, 9 aa, synthetic construct
AQMPRITTS

SEQ ID NO: 2214 - protein, 9 aa, synthetic construct
AQMLGRSTP

SEQ ID NO: 2215 - protein, 9 aa, synthetic construct
AQLREKSYA

SEQ ID NO: 2216 - protein, 9 aa, synthetic construct
AQMTVRLQP

SEQ ID NO: 2217 - protein, 9 aa, synthetic construct
AQTSPVKMR

SEQ ID NO: 2218 - protein, 9 aa, synthetic construct
AQNSSGDRS

SEQ ID NO: 2219 - protein, 9 aa, synthetic construct
AQVTSTAVT

SEQ ID NO: 2220 - protein, 9 aa, synthetic construct
AQISMSRSD

SEQ ID NO: 2221 - protein, 9 aa, synthetic construct
AQLGTTNMP

SEQ ID NO: 2222 - protein, 9 aa, synthetic construct
AQTSDREKA

SEQ ID NO: 2223 - protein, 9 aa, synthetic construct
AQPRTVPMP

SEQ ID NO: 2224 - protein, 9 aa, synthetic construct
AQSTYHTVN

SEQ ID NO: 2225 - protein, 9 aa, synthetic construct
AQPSALGGK

SEQ ID NO: 2226 - protein, 9 aa, synthetic construct
AQKANTTTV

SEQ ID NO: 2227 - protein, 9 aa, synthetic construct
AQVISPVRP

SEQ ID NO: 2228 - protein, 9 aa, synthetic construct
AQPAKYPET

SEQ ID NO: 2229 - protein, 9 aa, synthetic construct
AQQRDTDRL

SEQ ID NO: 2230 - protein, 9 aa, synthetic construct
AQGGDQKRT

SEQ ID NO: 2231 - protein, 9 aa, synthetic construct
AQYPNRPDL

SEQ ID NO: 2232 - protein, 9 aa, synthetic construct
AQVAHEHRS

SEQ ID NO: 2233 - protein, 9 aa, synthetic construct
AQCPAARAC

SEQ ID NO: 2234 - protein, 9 aa, synthetic construct
AQKPGPAMV

SEQ ID NO: 2235 - protein, 9 aa, synthetic construct
AQNDRANRV

SEQ ID NO: 2236 - protein, 9 aa, synthetic construct
AQDREWKFG

SEQ ID NO: 2237 - protein, 9 aa, synthetic construct
AQAFNRAAT

SEQ ID NO: 2238 - protein, 9 aa, synthetic construct
AQVASGKVL

SEQ ID NO: 2239 - protein, 9 aa, synthetic construct
AQTSRSSQI

SEQ ID NO: 2240 - protein, 9 aa, synthetic construct
AQLKPQTPP

SEQ ID NO: 2241 - protein, 9 aa, synthetic construct
AQNALVNQF

SEQ ID NO: 2242 - protein, 9 aa, synthetic construct
AQLSHTITA

SEQ ID NO: 2243 - protein, 9 aa, synthetic construct
AQNISGRPI

SEQ ID NO: 2244 - protein, 9 aa, synthetic construct
AQTTGHTVH

SEQ ID NO: 2245 - protein, 9 aa, synthetic construct
AQAPFQVGN

SEQ ID NO: 2246 - protein, 9 aa, synthetic construct
AQVGPRNGN

SEQ ID NO: 2247 - protein, 9 aa, synthetic construct
AQMGQKHVA

SEQ ID NO: 2248 - protein, 9 aa, synthetic construct
AQVPTNRTG

SEQ ID NO: 2249 - protein, 9 aa, synthetic construct
AQPDTSRPL

SEQ ID NO: 2250 - protein, 9 aa, synthetic construct
AQADLGRGL

SEQ ID NO: 2251 - protein, 9 aa, synthetic construct
AQNRTERSY

SEQ ID NO: 2252 - protein, 9 aa, synthetic construct
AQTYTLGEP

SEQ ID NO: 2253 - protein, 9 aa, synthetic construct
AQFTMTFPP

SEQ ID NO: 2254 - protein, 9 aa, synthetic construct
AQTYSRPQN

SEQ ID NO: 2255 - protein, 9 aa, synthetic construct
AQLTGHHNP

SEQ ID NO: 2256 - protein, 9 aa, synthetic construct
AQVTQDQSS

SEQ ID NO: 2257 - protein, 9 aa, synthetic construct
AQHQQKSLQ

SEQ ID NO: 2258 - protein, 9 aa, synthetic construct
AQTRNLDVA

SEQ ID NO: 2259 - protein, 9 aa, synthetic construct
AQLLTSSFG

SEQ ID NO: 2260 - protein, 9 aa, synthetic construct
AQFSNRSAS

SEQ ID NO: 2261 - protein, 9 aa, synthetic construct
AQNNYGRSN

SEQ ID NO: 2262 - protein, 9 aa, synthetic construct
AQGSYPNCQ

SEQ ID NO: 2263 - protein, 9 aa, synthetic construct
AQSGPKAPG

SEQ ID NO: 2264 - protein, 9 aa, synthetic construct
AQNSIMAPP

SEQ ID NO: 2265 - protein, 9 aa, synthetic construct
AQMLGVRSS

SEQ ID NO: 2266 - protein, 9 aa, synthetic construct
AQGRYVVEQ

SEQ ID NO: 2267 - protein, 9 aa, synthetic construct
AQPSQVSAS

SEQ ID NO: 2268 - protein, 9 aa, synthetic construct
AQPRLENSV

SEQ ID NO: 2269 - protein, 9 aa, synthetic construct
AQLYPPNMP

SEQ ID NO: 2270 - protein, 9 aa, synthetic construct
AQRSQIPSV

SEQ ID NO: 2271 - protein, 9 aa, synthetic construct
AQKALSGPM

SEQ ID NO: 2272 - protein, 9 aa, synthetic construct
AQASQPAAR

SEQ ID NO: 2273 - protein, 9 aa, synthetic construct
AQSRPTSAP

SEQ ID NO: 2274 - protein, 9 aa, synthetic construct
AQNGPRYSS

SEQ ID NO: 2275 - protein, 9 aa, synthetic construct
AQKTGTSIQ

SEQ ID NO: 2276 - protein, 9 aa, synthetic construct
AQHQVYEHS

SEQ ID NO: 2277 - protein, 9 aa, synthetic construct
AQTVVRNVS

SEQ ID NO: 2278 - protein, 9 aa, synthetic construct
AQCMAAQCR

SEQ ID NO: 2279 - protein, 9 aa, synthetic construct
AQWNYMNRA

SEQ ID NO: 2280 - protein, 9 aa, synthetic construct
AQMLPSGNP

SEQ ID NO: 2281 - protein, 9 aa, synthetic construct
AQETPAVRM

SEQ ID NO: 2282 - protein, 9 aa, synthetic construct
AQAKEKPEK

SEQ ID NO: 2283 - protein, 9 aa, synthetic construct
AQHGGGSRY

SEQ ID NO: 2284 - protein, 9 aa, synthetic construct
AQLNDATRY

SEQ ID NO: 2285 - protein, 9 aa, synthetic construct
AQESSYSYK

SEQ ID NO: 2286 - protein, 9 aa, synthetic construct
AQTVIAFGD

SEQ ID NO: 2287 - protein, 9 aa, synthetic construct
AQTVRTGIS

SEQ ID NO: 2288 - protein, 9 aa, synthetic construct
AQTIMSHNV

SEQ ID NO: 2289 - protein, 9 aa, synthetic construct
AQNMSLAFK

SEQ ID NO: 2290 - protein, 9 aa, synthetic construct
AQTLNFQSS

SEQ ID NO: 2291 - protein, 9 aa, synthetic construct
AQNSSITYL

SEQ ID NO: 2292 - protein, 9 aa, synthetic construct
AQSMTAKNL

SEQ ID NO: 2293 - protein, 9 aa, synthetic construct
AQIGEYRLK

SEQ ID NO: 2294 - protein, 9 aa, synthetic construct
AQSMTQYGL

SEQ ID NO: 2295 - protein, 9 aa, synthetic construct
AQNQNPVRT

SEQ ID NO: 2296 - protein, 9 aa, synthetic construct
AQQSPIMRM

SEQ ID NO: 2297 - protein, 9 aa, synthetic construct
AQSAVRMTG

SEQ ID NO: 2298 - protein, 9 aa, synthetic construct
AQTILQLGE

SEQ ID NO: 2299 - protein, 9 aa, synthetic construct
AQRETNAFI

SEQ ID NO: 2300 - protein, 9 aa, synthetic construct
AQTVTMQYA

SEQ ID NO: 2301 - protein, 9 aa, synthetic construct
AQTVMSQVS

SEQ ID NO: 2302 - protein, 9 aa, synthetic construct
AQHPLLTFG

SEQ ID NO: 2303 - protein, 9 aa, synthetic construct
AQAYDPNAR

SEQ ID NO: 2304 - protein, 9 aa, synthetic construct
AQENDIRRY

SEQ ID NO: 2305 - protein, 9 aa, synthetic construct
AQSIGVYGL

SEQ ID NO: 2306 - protein, 9 aa, synthetic construct
AQNVLKNGS

SEQ ID NO: 2307 - protein, 9 aa, synthetic construct
AQDPVKLGR

SEQ ID NO: 2308 - protein, 9 aa, synthetic construct
AQEVPVYRK

SEQ ID NO: 2309 - protein, 9 aa, synthetic construct
AQEVVMRTS

SEQ ID NO: 2310 - protein, 9 aa, synthetic construct
AQVQFNRDF

SEQ ID NO: 2311 - protein, 9 aa, synthetic construct
AQTQSPLPM

SEQ ID NO: 2312 - protein, 9 aa, synthetic construct
AQNITKLGA

SEQ ID NO: 2313 - protein, 9 aa, synthetic construct
AQSPFQNGL

SEQ ID NO: 2314 - protein, 9 aa, synthetic construct
AQNPVKMGA

SEQ ID NO: 2315 - protein, 9 aa, synthetic construct
AQVATAQLN

SEQ ID NO: 2316 - protein, 9 aa, synthetic construct
AQQRHAYDS

SEQ ID NO: 2317 - protein, 9 aa, synthetic construct
AQTVQHQSS

SEQ ID NO: 2318 - protein, 9 aa, synthetic construct
AQFQSPVTV

SEQ ID NO: 2319 - protein, 9 aa, synthetic construct
AQTTTSQRE

SEQ ID NO: 2320 - protein, 9 aa, synthetic construct
AQHVVKMSG

SEQ ID NO: 2321 - protein, 9 aa, synthetic construct
AQTMVGPGV

SEQ ID NO: 2322 - protein, 9 aa, synthetic construct
AQNTLSQMS

SEQ ID NO: 2323 - protein, 9 aa, synthetic construct
AQYVTMQVQ

SEQ ID NO: 2324 - protein, 9 aa, synthetic construct
AQMSNLVVS

SEQ ID NO: 2325 - protein, 9 aa, synthetic construct
AQSMVAGGG

SEQ ID NO: 2326 - protein, 9 aa, synthetic construct
AQVDVWGRA

SEQ ID NO: 2327 - protein, 9 aa, synthetic construct
AQAMVKAGA

SEQ ID NO: 2328 - protein, 9 aa, synthetic construct
AQTVLPVSR

SEQ ID NO: 2329 - protein, 9 aa, synthetic construct
AQLSLKYRE

SEQ ID NO: 2330 - protein, 9 aa, synthetic construct
AQQWELTPM

SEQ ID NO: 2331 - protein, 9 aa, synthetic construct
AQQMVRGGE

SEQ ID NO: 2332 - protein, 9 aa, synthetic construct
AQSPFKGGV

SEQ ID NO: 2333 - protein, 9 aa, synthetic construct
AQNVVGLGK

SEQ ID NO: 2334 - protein, 9 aa, synthetic construct
AQQSPVKMD

SEQ ID NO: 2335 - protein, 9 aa, synthetic construct
AQGVIREGN

SEQ ID NO: 2336 - protein, 9 aa, synthetic construct
AQTTTNQIK

SEQ ID NO: 2337 - protein, 9 aa, synthetic construct
AQVISYQIN

SEQ ID NO: 2338 - protein, 9 aa, synthetic construct
AQRVTQSGE

SEQ ID NO: 2339 - protein, 9 aa, synthetic construct
AQSMIKLGL

SEQ ID NO: 2340 - protein, 9 aa, synthetic construct
AQTVSYQVN

SEQ ID NO: 2341 - protein, 9 aa, synthetic construct
AQLKLSSKG

SEQ ID NO: 2342 - protein, 9 aa, synthetic construct
AQAMTALGA

SEQ ID NO: 2343 - protein, 9 aa, synthetic construct
AQSPVKTGL

SEQ ID NO: 2344 - protein, 9 aa, synthetic construct
AQRSSLSSL

SEQ ID NO: 2345 - protein, 9 aa, synthetic construct
AQSMAQNNK

SEQ ID NO: 2346 - protein, 9 aa, synthetic construct
AQGQSPLPH

SEQ ID NO: 2347 - protein, 9 aa, synthetic construct
AQHSVMTYV

SEQ ID NO: 2348 - protein, 9 aa, synthetic construct
AQLSDMKRY

SEQ ID NO: 2349 - protein, 9 aa, synthetic construct
AQGGLPKYG

SEQ ID NO: 2350 - protein, 9 aa, synthetic construct
AQSMFSQVE

SEQ ID NO: 2351 - protein, 9 aa, synthetic construct
AQSSRVSSP

SEQ ID NO: 2352 - protein, 9 aa, synthetic construct
AQQVVKMGL

SEQ ID NO: 2353 - protein, 9 aa, synthetic construct
AQHPVGLGM

SEQ ID NO: 2354 - protein, 9 aa, synthetic construct
AQTAQTRLM

SEQ ID NO: 2355 - protein, 9 aa, synthetic construct
AQTVVKMGT

SEQ ID NO: 2356 - protein, 9 aa, synthetic construct
AQSIGTYQV

SEQ ID NO: 2357 - protein, 9 aa, synthetic construct
AQGVLKMSS

SEQ ID NO: 2358 - protein, 9 aa, synthetic construct
AQQAPIRLG

SEQ ID NO: 2359 - protein, 9 aa, synthetic construct
AQPRNDPRY

SEQ ID NO: 2360 - protein, 9 aa, synthetic construct
AQSVIKSGE

SEQ ID NO: 2361 - protein, 9 aa, synthetic construct
AQKWDNSAS

SEQ ID NO: 2362 - protein, 9 aa, synthetic construct
AQMPTGMGL

SEQ ID NO: 2363 - protein, 9 aa, synthetic construct
AQTPLALGE

SEQ ID NO: 2364 - protein, 9 aa, synthetic construct
AQMVVRSGE

SEQ ID NO: 2365 - protein, 9 aa, synthetic construct
AQQVVKSGM

SEQ ID NO: 2366 - protein, 9 aa, synthetic construct
AQKDGVSKQ

SEQ ID NO: 2367 - protein, 9 aa, synthetic construct
AQAWTGAPK

SEQ ID NO: 2368 - protein, 9 aa, synthetic construct
AQLNTKFDS

SEQ ID NO: 2369 - protein, 9 aa, synthetic construct
AQSPVKFGT

SEQ ID NO: 2370 - protein, 9 aa, synthetic construct
AQSVYKTGE

SEQ ID NO: 2371 - protein, 9 aa, synthetic construct
AQQRSPPAK

SEQ ID NO: 2372 - protein, 9 aa, synthetic construct
AQPSPAGRT

SEQ ID NO: 2373 - protein, 9 aa, synthetic construct
AQNAVRMGE

SEQ ID NO: 2374 - protein, 9 aa, synthetic construct
AQLLLRWVR

SEQ ID NO: 2375 - protein, 9 aa, synthetic construct
AQRGNINPP

SEQ ID NO: 2376 - protein, 9 aa, synthetic construct
AQYSKLVTP

SEQ ID NO: 2377 - protein, 9 aa, synthetic construct
AQDKQAGGR

SEQ ID NO: 2378 - protein, 9 aa, synthetic construct
AQTVLRQGE

SEQ ID NO: 2379 - protein, 9 aa, synthetic construct
AQRVTGMGH

SEQ ID NO: 2380 - protein, 9 aa, synthetic construct
AQGVTQMSH

SEQ ID NO: 2381 - protein, 9 aa, synthetic construct
AQGPVGMTG

SEQ ID NO: 2382 - protein, 9 aa, synthetic construct
AQLIGRYEL

SEQ ID NO: 2383 - protein, 9 aa, synthetic construct
AQQSRSGSG

SEQ ID NO: 2384 - protein, 9 aa, synthetic construct
AQNASSPRG

SEQ ID NO: 2385 - protein, 9 aa, synthetic construct
AQSVLKNGA

SEQ ID NO: 2386 - protein, 9 aa, synthetic construct
AQSPIKLSH

SEQ ID NO: 2387 - protein, 9 aa, synthetic construct
AQTILKLGS

SEQ ID NO: 2388 - protein, 9 aa, synthetic construct
AQSVSAQRS

SEQ ID NO: 2389 - protein, 9 aa, synthetic construct
AQSFHPPVS

SEQ ID NO: 2390 - protein, 9 aa, synthetic construct
AQTVLRTGQ

SEQ ID NO: 2391 - protein, 9 aa, synthetic construct
AQGAISHKT

SEQ ID NO: 2392 - protein, 9 aa, synthetic construct
AQRPMTSDY

SEQ ID NO: 2393 - protein, 9 aa, synthetic construct
AQSIHYQKE

SEQ ID NO: 2394 - protein, 9 aa, synthetic construct
AQEVLRPRP

SEQ ID NO: 2395 - protein, 9 aa, synthetic construct
AQQMIKVSN

SEQ ID NO: 2396 - protein, 9 aa, synthetic construct
AQEVRMQKS

SEQ ID NO: 2397 - protein, 9 aa, synthetic construct
AQTLKIQIE

SEQ ID NO: 2398 - protein, 9 aa, synthetic construct
AQLVRVTSP

SEQ ID NO: 2399 - protein, 9 aa, synthetic construct
AQAVIRIGA

SEQ ID NO: 2400 - protein, 9 aa, synthetic construct
AQSGVSRVG

SEQ ID NO: 2401 - protein, 9 aa, synthetic construct
AQSPIKSHG

SEQ ID NO: 2402 - protein, 9 aa, synthetic construct
AQTVQRQTS

SEQ ID NO: 2403 - protein, 9 aa, synthetic construct
AQPMPRSPG

SEQ ID NO: 2404 - protein, 9 aa, synthetic construct
AQSSNSPFS

SEQ ID NO: 2405 - protein, 9 aa, synthetic construct
AQGPLREGM

SEQ ID NO: 2406 - protein, 9 aa, synthetic construct
AQSVLHQIH

SEQ ID NO: 2407 - protein, 9 aa, synthetic construct
AQRTGWDEG

SEQ ID NO: 2408 - protein, 9 aa, synthetic construct
AQMNSLSYL

SEQ ID NO: 2409 - protein, 9 aa, synthetic construct
AQGVQVGRL

SEQ ID NO: 2410 - protein, 9 aa, synthetic construct
AQAVTPRNI

SEQ ID NO: 2411 - protein, 9 aa, synthetic construct
AQNTVMQTS

SEQ ID NO: 2412 - protein, 9 aa, synthetic construct
AQSLVRMGE

SEQ ID NO: 2413 - protein, 9 aa, synthetic construct
AQGSSLVRP

SEQ ID NO: 2414 - protein, 9 aa, synthetic construct
AQTTAKPSL

SEQ ID NO: 2415 - protein, 9 aa, synthetic construct
AQYVNSGAL

SEQ ID NO: 2416 - protein, 9 aa, synthetic construct
AQTMFKNGE

SEQ ID NO: 2417 - protein, 9 aa, synthetic construct
AQQNATARV

SEQ ID NO: 2418 - protein, 9 aa, synthetic construct
AQSVISLGE

SEQ ID NO: 2419 - protein, 9 aa, synthetic construct
AQSPIARGE

SEQ ID NO: 2420 - protein, 9 aa, synthetic construct
AQYTTQQTS

SEQ ID NO: 2421 - protein, 9 aa, synthetic construct
AQGPVIQAR

SEQ ID NO: 2422 - protein, 9 aa, synthetic construct
AQATLAKSA

SEQ ID NO: 2423 - protein, 9 aa, synthetic construct
AQGCSKKTG

SEQ ID NO: 2424 - protein, 9 aa, synthetic construct
AQTVYSGIS

SEQ ID NO: 2425 - protein, 9 aa, synthetic construct
AQFVAAKTQ

SEQ ID NO: 2426 - protein, 9 aa, synthetic construct
AQTSSQRAG

SEQ ID NO: 2427 - protein, 9 aa, synthetic construct
AQSVLSHNI

SEQ ID NO: 2428 - protein, 9 aa, synthetic construct
AQGKGLSTI

SEQ ID NO: 2429 - protein, 9 aa, synthetic construct
AQRSSSASA

SEQ ID NO: 2430 - protein, 9 aa, synthetic construct
AQGMSLVSR

SEQ ID NO: 2431 - protein, 9 aa, synthetic construct
AQTTYTQVT

SEQ ID NO: 2432 - protein, 9 aa, synthetic construct
AQTLNKQIT

SEQ ID NO: 2433 - protein, 9 aa, synthetic construct
AQYLNSPMS

SEQ ID NO: 2434 - protein, 9 aa, synthetic construct
AQSGGCAGC

SEQ ID NO: 2435 - protein, 9 aa, synthetic construct
AQTAKYTTN

SEQ ID NO: 2436 - protein, 9 aa, synthetic construct
AQFINSSGL

SEQ ID NO: 2437 - protein, 9 aa, synthetic construct
AQASTPYSV

SEQ ID NO: 2438 - protein, 9 aa, synthetic construct
AQNVIKNGS

SEQ ID NO: 2439 - protein, 9 aa, synthetic construct
AQLMPSPLR

SEQ ID NO: 2440 - protein, 9 aa, synthetic construct
AQMRSSHSP

SEQ ID NO: 2441 - protein, 9 aa, synthetic construct
AQWKLYAGD

SEQ ID NO: 2442 - protein, 9 aa, synthetic construct
AQTTTLQVD

SEQ ID NO: 2443 - protein, 9 aa, synthetic construct
AQTVMVQRS

SEQ ID NO: 2444 - protein, 9 aa, synthetic construct
AQYLNGPVL

SEQ ID NO: 2445 - protein, 9 aa, synthetic construct
AQGPPATTP

SEQ ID NO: 2446 - protein, 9 aa, synthetic construct
AQRVHSQGP

SEQ ID NO: 2447 - protein, 9 aa, synthetic construct
AQTTYNQMD

SEQ ID NO: 2448 - protein, 9 aa, synthetic construct
AQHKSSTAG

SEQ ID NO: 2449 - protein, 9 aa, synthetic construct
AQMTGLKFS

SEQ ID NO: 2450 - protein, 9 aa, synthetic construct
AQGVVRQTS

SEQ ID NO: 2451 - protein, 9 aa, synthetic construct
AQVTGRASP

SEQ ID NO: 2452 - protein, 9 aa, synthetic construct
AQAIEPKRN

SEQ ID NO: 2453 - protein, 9 aa, synthetic construct
AQSINYQVT

SEQ ID NO: 2454 - protein, 9 aa, synthetic construct
AQNIRVQID

SEQ ID NO: 2455 - protein, 9 aa, synthetic construct
AQRVVKQGE

SEQ ID NO: 2456 - protein, 9 aa, synthetic construct
AQWRPTNAN

SEQ ID NO: 2457 - protein, 9 aa, synthetic construct
AQVLVGGRG

SEQ ID NO: 2458 - protein, 9 aa, synthetic construct
AQTIRTGIA

SEQ ID NO: 2459 - protein, 9 aa, synthetic construct
AQTPIRMTH

SEQ ID NO: 2460 - protein, 9 aa, synthetic construct
AQKVTGMGI

SEQ ID NO: 2461 - protein, 9 aa, synthetic construct
AQTVVKHGL

SEQ ID NO: 2462 - protein, 9 aa, synthetic construct
AQTVIAFGA

SEQ ID NO: 2463 - protein, 9 aa, synthetic construct
AQRNGQSGL

SEQ ID NO: 2464 - protein, 9 aa, synthetic construct
AQTEKMGLR

SEQ ID NO: 2465 - protein, 9 aa, synthetic construct
AQIREHSKT

SEQ ID NO: 2466 - protein, 9 aa, synthetic construct
AQWNNARSA

SEQ ID NO: 2467 - protein, 9 aa, synthetic construct
AQMYGLMEE

SEQ ID NO: 2468 - protein, 9 aa, synthetic construct
AQPFSPIFV

SEQ ID NO: 2469 - protein, 9 aa, synthetic construct
AQTSELPVV

SEQ ID NO: 2470 - protein, 9 aa, synthetic construct
AQSVMHQAS

SEQ ID NO: 2471 - protein, 9 aa, synthetic construct
AQTVNYQIA

SEQ ID NO: 2472 - protein, 9 aa, synthetic construct
AQMRPLLKE

SEQ ID NO: 2473 - protein, 9 aa, synthetic construct
AQVVGTNTG

SEQ ID NO: 2474 - protein, 9 aa, synthetic construct
AQLLSLSSK

SEQ ID NO: 2475 - protein, 9 aa, synthetic construct
AQLTTHQFS

SEQ ID NO: 2476 - protein, 9 aa, synthetic construct
AQSMPSPNR

SEQ ID NO: 2477 - protein, 9 aa, synthetic construct
AQHRTCVAF

SEQ ID NO: 2478 - protein, 9 aa, synthetic construct
AQRITMMGE

SEQ ID NO: 2479 - protein, 9 aa, synthetic construct
AQQDPVRLK

SEQ ID NO: 2480 - protein, 9 aa, synthetic construct
AQGVVAYSS

SEQ ID NO: 2481 - protein, 9 aa, synthetic construct
AQTRMQNNT

SEQ ID NO: 2482 - protein, 9 aa, synthetic construct
AQGVVGMKG

SEQ ID NO: 2483 - protein, 9 aa, synthetic construct
AQGPVQISG

SEQ ID NO: 2484 - protein, 9 aa, synthetic construct
AQTTVQQMY

SEQ ID NO: 2485 - protein, 9 aa, synthetic construct
AQSPLRAGA

SEQ ID NO: 2486 - protein, 9 aa, synthetic construct
AQSQSPVRL

SEQ ID NO: 2487 - protein, 9 aa, synthetic construct
AQKSVSRDG

SEQ ID NO: 2488 - protein, 9 aa, synthetic construct
AQSMLGAHP

SEQ ID NO: 2489 - protein, 9 aa, synthetic construct
AQLLGNNII

SEQ ID NO: 2490 - protein, 9 aa, synthetic construct
AQKMGHGMG

SEQ ID NO: 2491 - protein, 9 aa, synthetic construct
AQLRSVPQA

SEQ ID NO: 2492 - protein, 9 aa, synthetic construct
AQFGEVNNP

SEQ ID NO: 2493 - protein, 9 aa, synthetic construct
AQNVIKTGS

SEQ ID NO: 2494 - protein, 9 aa, synthetic construct
AQQLRGSQG

SEQ ID NO: 2495 - protein, 9 aa, synthetic construct
AQDLSGCSK

SEQ ID NO: 2496 - protein, 9 aa, synthetic construct
AQVQTPIRV

SEQ ID NO: 2497 - protein, 9 aa, synthetic construct
AQVGGVIKG

SEQ ID NO: 2498 - protein, 9 aa, synthetic construct
AQIIATHNN

SEQ ID NO: 2499 - protein, 9 aa, synthetic construct
AQLEYARSL

SEQ ID NO: 2500 - protein, 9 aa, synthetic construct
AQLTYYGIE

SEQ ID NO: 2501 - protein, 9 aa, synthetic construct
AQVLTSHNT

SEQ ID NO: 2502 - protein, 9 aa, synthetic construct
AQYVNSGPA

SEQ ID NO: 2503 - protein, 9 aa, synthetic construct
AQGVVAMSS

SEQ ID NO: 2504 - protein, 9 aa, synthetic construct
AQFGESEGV

SEQ ID NO: 2505 - protein, 9 aa, synthetic construct
AQRLNSGVP

SEQ ID NO: 2506 - protein, 9 aa, synthetic construct
AQVSSTSVP

SEQ ID NO: 2507 - protein, 9 aa, synthetic construct
AQAAINRRG

SEQ ID NO: 2508 - protein, 9 aa, synthetic construct
AQKVDSRVF

SEQ ID NO: 2509 - protein, 9 aa, synthetic construct
AQVMPKSQF

SEQ ID NO: 2510 - protein, 9 aa, synthetic construct
AQLLALCDK

SEQ ID NO: 2511 - protein, 9 aa, synthetic construct
AQGVIGMLG

SEQ ID NO: 2512 - protein, 9 aa, synthetic construct
AQGDTARVW

SEQ ID NO: 2513 - protein, 9 aa, synthetic construct
AQIMIRMGE

SEQ ID NO: 2514 - protein, 9 aa, synthetic construct
AQSVLLQFS

SEQ ID NO: 2515 - protein, 9 aa, synthetic construct
AQPVKIYNE

SEQ ID NO: 2516 - protein, 9 aa, synthetic construct
AQATVSKSR

SEQ ID NO: 2517 - protein, 9 aa, synthetic construct
AQSNLHGGG

SEQ ID NO: 2518 - protein, 9 aa, synthetic construct
AQNTTKLSF

SEQ ID NO: 2519 - protein, 9 aa, synthetic construct
AQKGDYSKG

SEQ ID NO: 2520 - protein, 9 aa, synthetic construct
AQNIVRLGL

SEQ ID NO: 2521 - protein, 9 aa, synthetic construct
AQWQLGASV

SEQ ID NO: 2522 - protein, 9 aa, synthetic construct
AQMACRLVL

SEQ ID NO: 2523 - protein, 9 aa, synthetic construct
AQTTLAQYD

SEQ ID NO: 2524 - protein, 9 aa, synthetic construct
AQGRLSEVK

SEQ ID NO: 2525 - protein, 9 aa, synthetic construct
AQLTQRIGS

SEQ ID NO: 2526 - protein, 9 aa, synthetic construct
AQPFKEVSR

SEQ ID NO: 2527 - protein, 9 aa, synthetic construct
AQAFDVNGR

SEQ ID NO: 2528 - protein, 9 aa, synthetic construct
AQHTANQKS

SEQ ID NO: 2529 - protein, 9 aa, synthetic construct
AQQQAPMRS

SEQ ID NO: 2530 - protein, 9 aa, synthetic construct
AQTVIVQRS

SEQ ID NO: 2531 - protein, 9 aa, synthetic construct
AQNPTSKPN

SEQ ID NO: 2532 - protein, 9 aa, synthetic construct
AQRNKLSSD

SEQ ID NO: 2533 - protein, 9 aa, synthetic construct
AQRVSTGIS

SEQ ID NO: 2534 - protein, 9 aa, synthetic construct
AQPTKYGQN

SEQ ID NO: 2535 - protein, 9 aa, synthetic construct
AQVVGHTKL

SEQ ID NO: 2536 - protein, 9 aa, synthetic construct
AQGWADHTA

SEQ ID NO: 2537 - protein, 9 aa, synthetic construct
AQMFDPNQY

SEQ ID NO: 2538 - protein, 9 aa, synthetic construct
AQIMFDVPY

SEQ ID NO: 2539 - protein, 9 aa, synthetic construct
AQLREWKES

SEQ ID NO: 2540 - protein, 9 aa, synthetic construct
AQNQSLVYK

SEQ ID NO: 2541 - protein, 9 aa, synthetic construct
AQNPYGPGT

SEQ ID NO: 2542 - protein, 9 aa, synthetic construct
AQKFREGDI

SEQ ID NO: 2543 - protein, 9 aa, synthetic construct
AQYNKLQAG

SEQ ID NO: 2544 - protein, 9 aa, synthetic construct
AQFINGPEH

SEQ ID NO: 2545 - protein, 9 aa, synthetic construct
AQHVRAGEN

SEQ ID NO: 2546 - protein, 9 aa, synthetic construct
AQVLRSQID

SEQ ID NO: 2547 - protein, 9 aa, synthetic construct
AQVKGLEKG

SEQ ID NO: 2548 - protein, 9 aa, synthetic construct
AQVCLVARV

SEQ ID NO: 2549 - protein, 9 aa, synthetic construct
AQRRVLETP

SEQ ID NO: 2550 - protein, 9 aa, synthetic construct
AQGNGSTKF

SEQ ID NO: 2551 - protein, 9 aa, synthetic construct
AQSVSLGTD

SEQ ID NO: 2552 - protein, 9 aa, synthetic construct
AQGVVAMMH

SEQ ID NO: 2553 - protein, 9 aa, synthetic construct
AQHHPLSSI

SEQ ID NO: 2554 - protein, 9 aa, synthetic construct
AQNPVGGRG

SEQ ID NO: 2555 - protein, 9 aa, synthetic construct
AQSVTPVGK

SEQ ID NO: 2556 - protein, 9 aa, synthetic construct
AQTMLKAGE

SEQ ID NO: 2557 - protein, 9 aa, synthetic construct
AQSPVRGGE

SEQ ID NO: 2558 - protein, 9 aa, synthetic construct
AQTQRLGIA

SEQ ID NO: 2559 - protein, 9 aa, synthetic construct
AQMITRQID

SEQ ID NO: 2560 - protein, 9 aa, synthetic construct
AQGRTPPSQ

SEQ ID NO: 2561 - protein, 9 aa, synthetic construct
AQSMNQNRR

SEQ ID NO: 2562 - protein, 9 aa, synthetic construct
AQLNTRVVS

SEQ ID NO: 2563 - protein, 9 aa, synthetic construct
AQKQSASSG

SEQ ID NO: 2564 - protein, 9 aa, synthetic construct
AQVRTGGAA

SEQ ID NO: 2565 - protein, 9 aa, synthetic construct
AQSLYSQLD

SEQ ID NO: 2566 - protein, 9 aa, synthetic construct
AQGVVQQQS

SEQ ID NO: 2567 - protein, 9 aa, synthetic construct
AQNQTPIRS

SEQ ID NO: 2568 - protein, 9 aa, synthetic construct
AQTAVSQVR

SEQ ID NO: 2569 - protein, 9 aa, synthetic construct
AQASEYRAL

SEQ ID NO: 2570 - protein, 9 aa, synthetic construct
AQGARTQDR

SEQ ID NO: 2571 - protein, 9 aa, synthetic construct
AQRGSSMRD

SEQ ID NO: 2572 - protein, 9 aa, synthetic construct
AQQTPVARM

SEQ ID NO: 2573 - protein, 9 aa, synthetic construct
AQGASMSYK

SEQ ID NO: 2574 - protein, 9 aa, synthetic construct
AQVTRAVTG

SEQ ID NO: 2575 - protein, 9 aa, synthetic construct
AQCMSICSA

SEQ ID NO: 2576 - protein, 9 aa, synthetic construct
AQGNVTKSA

SEQ ID NO: 2577 - protein, 9 aa, synthetic construct
AQRGATSTN

SEQ ID NO: 2578 - protein, 9 aa, synthetic construct
AQVYARSLP

SEQ ID NO: 2579 - protein, 9 aa, synthetic construct
AQTKIPNGQ

SEQ ID NO: 2580 - protein, 9 aa, synthetic construct
AQCMASKSC

SEQ ID NO: 2581 - protein, 9 aa, synthetic construct
AQNPVKIGF

SEQ ID NO: 2582 - protein, 9 aa, synthetic construct
AQLDKMFST

SEQ ID NO: 2583 - protein, 9 aa, synthetic construct
AQYINGPSM

SEQ ID NO: 2584 - protein, 9 aa, synthetic construct
AQDNITSFS

SEQ ID NO: 2585 - protein, 9 aa, synthetic construct
AQYKVTSGN

SEQ ID NO: 2586 - protein, 9 aa, synthetic construct
AQLSSSLKT

SEQ ID NO: 2587 - protein, 9 aa, synthetic construct
AQNPVGPRG

SEQ ID NO: 2588 - protein, 9 aa, synthetic construct
AQQFSKSTV

SEQ ID NO: 2589 - protein, 9 aa, synthetic construct
AQVRTNPLK

SEQ ID NO: 2590 - protein, 9 aa, synthetic construct
AQTQSTRMG

SEQ ID NO: 2591 - protein, 9 aa, synthetic construct
AQGKSLVFT

SEQ ID NO: 2592 - protein, 9 aa, synthetic construct
AQMMTGHGL

SEQ ID NO: 2593 - protein, 9 aa, synthetic construct
AQGAGYSSI

SEQ ID NO: 2594 - protein, 9 aa, synthetic construct
AQIGTTYKS

SEQ ID NO: 2595 - protein, 9 aa, synthetic construct
AQSTLNQRS

SEQ ID NO: 2596 - protein, 9 aa, synthetic construct
AQRGVLPHL

SEQ ID NO: 2597 - protein, 9 aa, synthetic construct
AQRSTGDRF

SEQ ID NO: 2598 - protein, 9 aa, synthetic construct
AQQRSSLVQ

SEQ ID NO: 2599 - protein, 9 aa, synthetic construct
AQWSTSCAQ

SEQ ID NO: 2600 - protein, 9 aa, synthetic construct
AQTSLRSVG

SEQ ID NO: 2601 - protein, 9 aa, synthetic construct
AQGPTKFGG

SEQ ID NO: 2602 - protein, 9 aa, synthetic construct
AQGVIAFGG

SEQ ID NO: 2603 - protein, 9 aa, synthetic construct
AQRPQEHKM

SEQ ID NO: 2604 - protein, 9 aa, synthetic construct
AQAQISGKI

SEQ ID NO: 2605 - protein, 9 aa, synthetic construct
AQGDEALAT

SEQ ID NO: 2606 - protein, 9 aa, synthetic construct
AQMDGWGRT

SEQ ID NO: 2607 - protein, 9 aa, synthetic construct
AQAVIKFNG

SEQ ID NO: 2608 - protein, 9 aa, synthetic construct
AQNARTHNV

SEQ ID NO: 2609 - protein, 9 aa, synthetic construct
AQPFPARQT

SEQ ID NO: 2610 - protein, 9 aa, synthetic construct
AQFPSGTKN

SEQ ID NO: 2611 - protein, 9 aa, synthetic construct
AQDIRVSTG

SEQ ID NO: 2612 - protein, 9 aa, synthetic construct
AQAVVKISH

SEQ ID NO: 2613 - protein, 9 aa, synthetic construct
AQGLSLSSK

SEQ ID NO: 2614 - protein, 9 aa, synthetic construct
AQEKAQVGR

SEQ ID NO: 2615 - protein, 9 aa, synthetic construct
AQENSISFR

SEQ ID NO: 2616 - protein, 9 aa, synthetic construct
AQNEPFMMD

SEQ ID NO: 2617 - protein, 9 aa, synthetic construct
AQYVNSAGF

SEQ ID NO: 2618 - protein, 9 aa, synthetic construct
AQNRGLNGM

SEQ ID NO: 2619 - protein, 9 aa, synthetic construct
AQSHAVKYP

SEQ ID NO: 2620 - protein, 9 aa, synthetic construct
AQLSAFTNM

SEQ ID NO: 2621 - protein, 9 aa, synthetic construct
AQSFDPNGS

SEQ ID NO: 2622 - protein, 9 aa, synthetic construct
AQVNERARL

SEQ ID NO: 2623 - protein, 9 aa, synthetic construct
AQSNSYSYK

SEQ ID NO: 2624 - protein, 9 aa, synthetic construct
AQRFSEQIS

SEQ ID NO: 2625 - protein, 9 aa, synthetic construct
AQSGCDSLS

SEQ ID NO: 2626 - protein, 9 aa, synthetic construct
AQTQNPVDN

SEQ ID NO: 2627 - protein, 9 aa, synthetic construct
AQSPIPAGA

SEQ ID NO: 2628 - protein, 9 aa, synthetic construct
AQSMVGPGN

SEQ ID NO: 2629 - protein, 9 aa, synthetic construct
AQTMTKRGE

SEQ ID NO: 2630 - protein, 9 aa, synthetic construct
AQPTDVRRM

SEQ ID NO: 2631 - protein, 9 aa, synthetic construct
AQNIYKSAS

SEQ ID NO: 2632 - protein, 9 aa, synthetic construct
AQGMSLTFR

SEQ ID NO: 2633 - protein, 9 aa, synthetic construct
AQSPIGIHG

SEQ ID NO: 2634 - protein, 9 aa, synthetic construct
AQSYSKLTI

SEQ ID NO: 2635 - protein, 9 aa, synthetic construct
AQSMTGIGM

SEQ ID NO: 2636 - protein, 9 aa, synthetic construct
AQTPYQTGN

SEQ ID NO: 2637 - protein, 9 aa, synthetic construct
AQLTRPGTA

SEQ ID NO: 2638 - protein, 9 aa, synthetic construct
AQFVMYAYD

SEQ ID NO: 2639 - protein, 9 aa, synthetic construct
AQADGLFKS

SEQ ID NO: 2640 - protein, 9 aa, synthetic construct
AQRKLRLQD

SEQ ID NO: 2641 - protein, 9 aa, synthetic construct
AQHGNAGYA

SEQ ID NO: 2642 - protein, 9 aa, synthetic construct
AQPSSLSSR

SEQ ID NO: 2643 - protein, 9 aa, synthetic construct
AQSLIRQAS

SEQ ID NO: 2644 - protein, 9 aa, synthetic construct
AQLLRSSAG

SEQ ID NO: 2645 - protein, 9 aa, synthetic construct
AQSVTGTGF

SEQ ID NO: 2646 - protein, 9 aa, synthetic construct
AQEKGTHFL

SEQ ID NO: 2647 - protein, 9 aa, synthetic construct
AQGMRSTSR

SEQ ID NO: 2648 - protein, 9 aa, synthetic construct
AQDVVGLGL

SEQ ID NO: 2649 - protein, 9 aa, synthetic construct
AQGVVALSS

SEQ ID NO: 2650 - protein, 9 aa, synthetic construct
AQMNKVSQG

SEQ ID NO: 2651 - protein, 9 aa, synthetic construct
AQYSGSFMS

SEQ ID NO: 2652 - protein, 9 aa, synthetic construct
AQGTRLPHI

SEQ ID NO: 2653 - protein, 9 aa, synthetic construct
AQVFATHNV

SEQ ID NO: 2654 - protein, 9 aa, synthetic construct
AQGVVGNSS

SEQ ID NO: 2655 - protein, 9 aa, synthetic construct
AQSSSYYDA

SEQ ID NO: 2656 - protein, 9 aa, synthetic construct
AQLHARASS

SEQ ID NO: 2657 - protein, 9 aa, synthetic construct
AQMTVSQKS

SEQ ID NO: 2658 - protein, 9 aa, synthetic construct
AQWAGVTIS

SEQ ID NO: 2659 - protein, 9 aa, synthetic construct
AQIYKTTST

SEQ ID NO: 2660 - protein, 9 aa, synthetic construct
AQHDGVSRT

SEQ ID NO: 2661 - protein, 9 aa, synthetic construct
AQWHTQCSA

SEQ ID NO: 2662 - protein, 9 aa, synthetic construct
AQRTPSHAN

SEQ ID NO: 2663 - protein, 9 aa, synthetic construct
AQSTPRSHG

SEQ ID NO: 2664 - protein, 9 aa, synthetic construct
AQRAADPTV

SEQ ID NO: 2665 - protein, 9 aa, synthetic construct
AQILTYAYD

SEQ ID NO: 2666 - protein, 9 aa, synthetic construct
AQKTVPLWP

SEQ ID NO: 2667 - protein, 9 aa, synthetic construct
AQIVRPPLT

SEQ ID NO: 2668 - protein, 9 aa, synthetic construct
AQQMIRLGD

SEQ ID NO: 2669 - protein, 9 aa, synthetic construct
AQSMTPNGG

SEQ ID NO: 2670 - protein, 9 aa, synthetic construct
AQGVVQLGW

SEQ ID NO: 2671 - protein, 9 aa, synthetic construct
AQSQCTNRL

SEQ ID NO: 2672 - protein, 9 aa, synthetic construct
AQGSNSKVS

SEQ ID NO: 2673 - protein, 9 aa, synthetic construct
AQFTNKPPV

SEQ ID NO: 2674 - protein, 9 aa, synthetic construct
AQAISAYSC

SEQ ID NO: 2675 - protein, 9 aa, synthetic construct
AQGLPCVAS

SEQ ID NO: 2676 - protein, 9 aa, synthetic construct
AQDNSRVPR

SEQ ID NO: 2677 - protein, 9 aa, synthetic construct
AQTYRSGSA

SEQ ID NO: 2678 - protein, 9 aa, synthetic construct
AQMRERKMF

SEQ ID NO: 2679 - protein, 9 aa, synthetic construct
AQTVTRQTT

SEQ ID NO: 2680 - protein, 9 aa, synthetic construct
AQGVVREGA

SEQ ID NO: 2681 - protein, 9 aa, synthetic construct
AQTITIPLY

SEQ ID NO: 2682 - protein, 9 aa, synthetic construct
AQYLNSSGS

SEQ ID NO: 2683 - protein, 9 aa, synthetic construct
AQASMPSAR

SEQ ID NO: 2684 - protein, 9 aa, synthetic construct
AQAGRFNES

SEQ ID NO: 2685 - protein, 9 aa, synthetic construct
AQGKITPMY

SEQ ID NO: 2686 - protein, 9 aa, synthetic construct
AQSYETDAL

SEQ ID NO: 2687 - protein, 9 aa, synthetic construct
AQQPGRGHL

SEQ ID NO: 2688 - protein, 9 aa, synthetic construct
AQYLKDRTM

SEQ ID NO: 2689 - protein, 9 aa, synthetic construct
AQLKSLSYL

SEQ ID NO: 2690 - protein, 9 aa, synthetic construct
AQKRYGHRD

SEQ ID NO: 2691 - protein, 9 aa, synthetic construct
AQRHEVRRN

SEQ ID NO: 2692 - protein, 9 aa, synthetic construct
AQDSKAVST

SEQ ID NO: 2693 - protein, 9 aa, synthetic construct
AQGVIGNGG

SEQ ID NO: 2694 - protein, 9 aa, synthetic construct
AQLKGISKG

SEQ ID NO: 2695 - protein, 9 aa, synthetic construct
AQSGFTTVN

SEQ ID NO: 2696 - protein, 9 aa, synthetic construct
AQSAPPIPR

SEQ ID NO: 2697 - protein, 9 aa, synthetic construct
AQTGKMQCS

SEQ ID NO: 2698 - protein, 9 aa, synthetic construct
AQGFVPTLT

SEQ ID NO: 2699 - protein, 9 aa, synthetic construct
AQKTVLIST

SEQ ID NO: 2700 - protein, 9 aa, synthetic construct
AQWSSIVTS

SEQ ID NO: 2701 - protein, 9 aa, synthetic construct
AQIYALSSG

SEQ ID NO: 2702 - protein, 9 aa, synthetic construct
AQSVVYQLT

SEQ ID NO: 2703 - protein, 9 aa, synthetic construct
AQAIIRMGE

SEQ ID NO: 2704 - protein, 9 aa, synthetic construct
AQITTSQLT

SEQ ID NO: 2705 - protein, 9 aa, synthetic construct
AQWMKATTV

SEQ ID NO: 2706 - protein, 9 aa, synthetic construct
AQVSGSTLR

SEQ ID NO: 2707 - protein, 9 aa, synthetic construct
AQTRAAVCS

SEQ ID NO: 2708 - protein, 9 aa, synthetic construct
AQRDAKLMD

SEQ ID NO: 2709 - protein, 9 aa, synthetic construct
AQKSGLDKF

SEQ ID NO: 2710 - protein, 9 aa, synthetic construct
AQKWDKLSS

SEQ ID NO: 2711 - protein, 9 aa, synthetic construct
AQNPVRSGV

SEQ ID NO: 2712 - protein, 9 aa, synthetic construct
AQSPLPIVR

SEQ ID NO: 2713 - protein, 9 aa, synthetic construct
AQGPVVKDR

SEQ ID NO: 2714 - protein, 9 aa, synthetic construct
AQSMTGVNP

SEQ ID NO: 2715 - protein, 9 aa, synthetic construct
AQTPTARLS

SEQ ID NO: 2716 - protein, 9 aa, synthetic construct
AQARSVPGS

SEQ ID NO: 2717 - protein, 9 aa, synthetic construct
AQSTLNQVS

SEQ ID NO: 2718 - protein, 9 aa, synthetic construct
AQMKHAVNA

SEQ ID NO: 2719 - protein, 9 aa, synthetic construct
AQSMTPSGS

SEQ ID NO: 2720 - protein, 9 aa, synthetic construct
AQPPVVQSG

SEQ ID NO: 2721 - protein, 9 aa, synthetic construct
AQSTMNQYE

SEQ ID NO: 2722 - protein, 9 aa, synthetic construct
AQYLMKCAS

SEQ ID NO: 2723 - protein, 9 aa, synthetic construct
AQGIASSRT

SEQ ID NO: 2724 - protein, 9 aa, synthetic construct
AQNESYAYK

SEQ ID NO: 2725 - protein, 9 aa, synthetic construct
AQNPVKMSQ

SEQ ID NO: 2726 - protein, 9 aa, synthetic construct
AQDVIRLGK

SEQ ID NO: 2727 - protein, 9 aa, synthetic construct
AQSMIRNGA

SEQ ID NO: 2728 - protein, 9 aa, synthetic construct
AQLVFGRDM

SEQ ID NO: 2729 - protein, 9 aa, synthetic construct
AQLWETTLP

SEQ ID NO: 2730 - protein, 9 aa, synthetic construct
AQSVDGLKS

SEQ ID NO: 2731 - protein, 9 aa, synthetic construct
AQSVSFQIT

SEQ ID NO: 2732 - protein, 9 aa, synthetic construct
AQGMSLLTR

SEQ ID NO: 2733 - protein, 9 aa, synthetic construct
AQGAHGTPF

SEQ ID NO: 2734 - protein, 9 aa, synthetic construct
AQDPLLYVK

SEQ ID NO: 2735 - protein, 9 aa, synthetic construct
AQHVRQTSS

SEQ ID NO: 2736 - protein, 9 aa, synthetic construct
AQRTGSGVH

SEQ ID NO: 2737 - protein, 9 aa, synthetic construct
AQLVYARTM

SEQ ID NO: 2738 - protein, 9 aa, synthetic construct
AQRKKTPRR

SEQ ID NO: 2739 - protein, 9 aa, synthetic construct
AQVVITPAR

SEQ ID NO: 2740 - protein, 9 aa, synthetic construct
AQAVIRNGS

SEQ ID NO: 2741 - protein, 9 aa, synthetic construct
AQVPNAFSK

SEQ ID NO: 2742 - protein, 9 aa, synthetic construct
AQLQMERSK

SEQ ID NO: 2743 - protein, 9 aa, synthetic construct
AQRVKVSGD

SEQ ID NO: 2744 - protein, 9 aa, synthetic construct
AQGQLACVT

SEQ ID NO: 2745 - protein, 9 aa, synthetic construct
AQKLKKDYE

SEQ ID NO: 2746 - protein, 9 aa, synthetic construct
AQTYIGPGE

SEQ ID NO: 2747 - protein, 9 aa, synthetic construct
AQNRADKTI

SEQ ID NO: 2748 - protein, 9 aa, synthetic construct
AQQETFAWR

SEQ ID NO: 2749 - protein, 9 aa, synthetic construct
AQATKTRIT

SEQ ID NO: 2750 - protein, 9 aa, synthetic construct
AQMLIPVSC

SEQ ID NO: 2751 - protein, 9 aa, synthetic construct
AQTHSAMSS

SEQ ID NO: 2752 - protein, 9 aa, synthetic construct
AQQNPVRAE

SEQ ID NO: 2753 - protein, 9 aa, synthetic construct
AQTGPMKME

SEQ ID NO: 2754 - protein, 9 aa, synthetic construct
AQMVFTSAT

SEQ ID NO: 2755 - protein, 9 aa, synthetic construct
AQYFNEQRS

SEQ ID NO: 2756 - protein, 9 aa, synthetic construct
AQNPVGAGG

SEQ ID NO: 2757 - protein, 9 aa, synthetic construct
AQGVVAFKS

SEQ ID NO: 2758 - protein, 9 aa, synthetic construct
AQNVLYQTS

SEQ ID NO: 2759 - protein, 9 aa, synthetic construct
AQDNLHTAR

SEQ ID NO: 2760 - protein, 9 aa, synthetic construct
AQSQGLVKM

SEQ ID NO: 2761 - protein, 9 aa, synthetic construct
AQTGLKGNG

SEQ ID NO: 2762 - protein, 9 aa, synthetic construct
AQYLVSNLS

SEQ ID NO: 2763 - protein, 9 aa, synthetic construct
AQLESYRTA

SEQ ID NO: 2764 - protein, 9 aa, synthetic construct
AQVPRQVNF

SEQ ID NO: 2765 - protein, 9 aa, synthetic construct
AQSVTFQLS

SEQ ID NO: 2766 - protein, 9 aa, synthetic construct
AQLNILMEV

SEQ ID NO: 2767 - protein, 9 aa, synthetic construct
AQSGIHNQT

SEQ ID NO: 2768 - protein, 9 aa, synthetic construct
AQQLFACNK

SEQ ID NO: 2769 - protein, 9 aa, synthetic construct
AQGTIAKWT

SEQ ID NO: 2770 - protein, 9 aa, synthetic construct
AQNLLRAKL

SEQ ID NO: 2771 - protein, 9 aa, synthetic construct
AQNRTNAYR

SEQ ID NO: 2772 - protein, 9 aa, synthetic construct
AQEQMSFHG

SEQ ID NO: 2773 - protein, 9 aa, synthetic construct
AQIGAHEFS

SEQ ID NO: 2774 - protein, 9 aa, synthetic construct
AQTLNTHNT

SEQ ID NO: 2775 - protein, 9 aa, synthetic construct
AQSVVGNGV

SEQ ID NO: 2776 - protein, 9 aa, synthetic construct
AQSLNMMGV

SEQ ID NO: 2777 - protein, 9 aa, synthetic construct
AQTKMRDGG

SEQ ID NO: 2778 - protein, 9 aa, synthetic construct
AQTNIEATP

SEQ ID NO: 2779 - protein, 9 aa, synthetic construct
AQRTLPDTK

SEQ ID NO: 2780 - protein, 9 aa, synthetic construct
AQSVVRSGG

SEQ ID NO: 2781 - protein, 9 aa, synthetic construct
AQICTSTTY

SEQ ID NO: 2782 - protein, 9 aa, synthetic construct
AQTCEEIVL

SEQ ID NO: 2783 - protein, 9 aa, synthetic construct
AQGTPIRMT

SEQ ID NO: 2784 - protein, 9 aa, synthetic construct
AQGTYCAGQ

SEQ ID NO: 2785 - protein, 9 aa, synthetic construct
AQACGLSDV

SEQ ID NO: 2786 - protein, 9 aa, synthetic construct
AQERLEKRN

SEQ ID NO: 2787 - protein, 9 aa, synthetic construct
AQWCERYRE

SEQ ID NO: 2788 - protein, 9 aa, synthetic construct
AQSKSDAPR

SEQ ID NO: 2789 - protein, 9 aa, synthetic construct
AQVLSGHHG

SEQ ID NO: 2790 - protein, 9 aa, synthetic construct
AQDLLKICR

SEQ ID NO: 2791 - protein, 9 aa, synthetic construct
AQFLDLGQM

SEQ ID NO: 2792 - protein, 9 aa, synthetic construct
AQEVYKPYH

SEQ ID NO: 2793 - protein, 9 aa, synthetic construct
AQQGVSGKH

SEQ ID NO: 2794 - protein, 9 aa, synthetic construct
AQPIGGFME

SEQ ID NO: 2795 - protein, 9 aa, synthetic construct
AQTNTRLTR

SEQ ID NO: 2796 - protein, 9 aa, synthetic construct
AQHRLTAAH

SEQ ID NO: 2797 - protein, 9 aa, synthetic construct
AQAYLDRNT

SEQ ID NO: 2798 - protein, 9 aa, synthetic construct
AQYRNAMLG

SEQ ID NO: 2799 - protein, 9 aa, synthetic construct
AQSPKLFPA

SEQ ID NO: 2800 - protein, 9 aa, synthetic construct
AQNMTKMSA

SEQ ID NO: 2801 - protein, 9 aa, synthetic construct
AQVKGNFIA

SEQ ID NO: 2802 - protein, 9 aa, synthetic construct
AQSPVSMGY

SEQ ID NO: 2803 - protein, 9 aa, synthetic construct
AQLSVTGRT

SEQ ID NO: 2804 - protein, 9 aa, synthetic construct
AQFVDPNQR

SEQ ID NO: 2805 - protein, 9 aa, synthetic construct
AQPLVERIV

SEQ ID NO: 2806 - protein, 9 aa, synthetic construct
AQFVNCLED

SEQ ID NO: 2807 - protein, 9 aa, synthetic construct
AQATRGNLL

SEQ ID NO: 2808 - protein, 9 aa, synthetic construct
AQGYMLPHV

SEQ ID NO: 2809 - protein, 9 aa, synthetic construct
AQIMYNRDF

SEQ ID NO: 2810 - protein, 9 aa, synthetic construct
AQIIGANCP

SEQ ID NO: 2811 - protein, 9 aa, synthetic construct
AQKLVGRLQ

SEQ ID NO: 2812 - protein, 9 aa, synthetic construct
AQFNRPGTN

SEQ ID NO: 2813 - protein, 9 aa, synthetic construct
AQKGTERKL

SEQ ID NO: 2814 - protein, 9 aa, synthetic construct
AQRGNMCRA

SEQ ID NO: 2815 - protein, 9 aa, synthetic construct
AQANRMKCT

SEQ ID NO: 2816 - protein, 9 aa, synthetic construct
AQRWDLETA

SEQ ID NO: 2817 - protein, 9 aa, synthetic construct
AQQKGQGFQ

SEQ ID NO: 2818 - protein, 9 aa, synthetic construct
AQCVSMKRD

SEQ ID NO: 2819 - protein, 9 aa, synthetic construct
AQERTGTLL

SEQ ID NO: 2820 - protein, 9 aa, synthetic construct
AQTARSGIY

SEQ ID NO: 2821 - protein, 9 aa, synthetic construct
AQYRSMQVD

SEQ ID NO: 2822 - protein, 9 aa, synthetic construct
AQTVLVQVM

SEQ ID NO: 2823 - protein, 9 aa, synthetic construct
AQSWSSQVD

SEQ ID NO: 2824 - protein, 9 aa, synthetic construct
AQQYDVNGR

SEQ ID NO: 2825 - protein, 9 aa, synthetic construct
AQVVTSQKS

SEQ ID NO: 2826 - protein, 9 aa, synthetic construct
AQSWDNQVT

SEQ ID NO: 2827 - protein, 9 aa, synthetic construct
AQTQNSARS

SEQ ID NO: 2828 - protein, 9 aa, synthetic construct
AQNHQSGRV

SEQ ID NO: 2829 - protein, 9 aa, synthetic construct
AQSNKSPNH

SEQ ID NO: 2830 - protein, 9 aa, synthetic construct
AQVNGLILR

SEQ ID NO: 2831 - protein, 9 aa, synthetic construct
AQTKYHLDL

SEQ ID NO: 2832 - protein, 9 aa, synthetic construct
AQCVVKCGV

SEQ ID NO: 2833 - protein, 9 aa, synthetic construct
AQQMTQGGS

SEQ ID NO: 2834 - protein, 9 aa, synthetic construct
AQRVLQEHN

SEQ ID NO: 2835 - protein, 9 aa, synthetic construct
AQASSNASK

SEQ ID NO: 2836 - protein, 9 aa, synthetic construct
AQKNSLSTL

SEQ ID NO: 2837 - protein, 9 aa, synthetic construct
AQFRSQSLS

SEQ ID NO: 2838 - protein, 9 aa, synthetic construct
AQICEQFVY

SEQ ID NO: 2839 - protein, 9 aa, synthetic construct
AQESDVSQY

SEQ ID NO: 2840 - protein, 9 aa, synthetic construct
AQVMREIPI

SEQ ID NO: 2841 - protein, 9 aa, synthetic construct
AQLSGRTYN

SEQ ID NO: 2842 - protein, 9 aa, synthetic construct
AQAEAPRGF

SEQ ID NO: 2843 - protein, 9 aa, synthetic construct
AQQNPVRAL

SEQ ID NO: 2844 - protein, 9 aa, synthetic construct
AQKLDKLIS

SEQ ID NO: 2845 - protein, 9 aa, synthetic construct
AQPRTGHTT

SEQ ID NO: 2846 - protein, 9 aa, synthetic construct
AQISVAERM

SEQ ID NO: 2847 - protein, 9 aa, synthetic construct
AQSRPAPLH

SEQ ID NO: 2848 - protein, 9 aa, synthetic construct
AQGTTILRP

SEQ ID NO: 2849 - protein, 9 aa, synthetic construct
AQLKHKMYY

SEQ ID NO: 2850 - protein, 9 aa, synthetic construct
AQLDTLYLN

SEQ ID NO: 2851 - protein, 9 aa, synthetic construct
AQFRNNTYR

SEQ ID NO: 2852 - protein, 9 aa, synthetic construct
AQNRFEPRR

SEQ ID NO: 2853 - protein, 9 aa, synthetic construct
AQFYTSHNT

SEQ ID NO: 2854 - protein, 9 aa, synthetic construct
AQQTRKSAA

SEQ ID NO: 2855 - protein, 9 aa, synthetic construct
AQTLHSQYS

SEQ ID NO: 2856 - protein, 9 aa, synthetic construct
AQLMARWPE

SEQ ID NO: 2857 - protein, 9 aa, synthetic construct
AQRALKHHN

SEQ ID NO: 2858 - protein, 9 aa, synthetic construct
AQNPHSQTV

SEQ ID NO: 2859 - protein, 9 aa, synthetic construct
AQAVIRDAG

SEQ ID NO: 2860 - protein, 9 aa, synthetic construct
AQLAASQPS

SEQ ID NO: 2861 - protein, 9 aa, synthetic construct
AQRLECRMI

SEQ ID NO: 2862 - protein, 9 aa, synthetic construct
AQYPSAVCK

SEQ ID NO: 2863 - protein, 9 aa, synthetic construct
AQKDGHNKG

SEQ ID NO: 2864 - protein, 9 aa, synthetic construct
AQKGAVTVN

SEQ ID NO: 2865 - protein, 9 aa, synthetic construct
AQECIGNKD

SEQ ID NO: 2866 - protein, 9 aa, synthetic construct
AQTSRPVST

SEQ ID NO: 2867 - protein, 9 aa, synthetic construct
AQNGGFSSK

SEQ ID NO: 2868 - protein, 9 aa, synthetic construct
AQTARPLAS

SEQ ID NO: 2869 - protein, 9 aa, synthetic construct
AQIKGGGSK

SEQ ID NO: 2870 - protein, 9 aa, synthetic construct
AQSFNSQVF

SEQ ID NO: 2871 - protein, 9 aa, synthetic construct
AQKGMPKDR

SEQ ID NO: 2872 - protein, 9 aa, synthetic construct
AQTRQIPAI

SEQ ID NO: 2873 - protein, 9 aa, synthetic construct
AQTRTNQGP

SEQ ID NO: 2874 - protein, 9 aa, synthetic construct
AQRSLNHGG

SEQ ID NO: 2875 - protein, 9 aa, synthetic construct
AQKSWEDKC

SEQ ID NO: 2876 - protein, 9 aa, synthetic construct
AQNMLRMGA

SEQ ID NO: 2877 - protein, 9 aa, synthetic construct
AQQCGKPSS

SEQ ID NO: 2878 - protein, 9 aa, synthetic construct
AQCVPHTST

SEQ ID NO: 2879 - protein, 9 aa, synthetic construct
AQHRLWDEE

SEQ ID NO: 2880 - protein, 9 aa, synthetic construct
AQQAPRLSA

SEQ ID NO: 2881 - protein, 9 aa, synthetic construct
AQSWDKLDK

SEQ ID NO: 2882 - protein, 9 aa, synthetic construct
AQERKSAVS

SEQ ID NO: 2883 - protein, 9 aa, synthetic construct
AQAANPRRS

SEQ ID NO: 2884 - protein, 9 aa, synthetic construct
AQAGGLTKY

SEQ ID NO: 2885 - protein, 9 aa, synthetic construct
AQSAIRMKC

SEQ ID NO: 2886 - protein, 9 aa, synthetic construct
AQSRVKTHV

SEQ ID NO: 2887 - protein, 9 aa, synthetic construct
AQVTTKQIH

SEQ ID NO: 2888 - protein, 9 aa, synthetic construct
AQLNRGGAA

SEQ ID NO: 2889 - protein, 9 aa, synthetic construct
AQRSQAMVS

SEQ ID NO: 2890 - protein, 9 aa, synthetic construct
AQIRWVRGV

SEQ ID NO: 2891 - protein, 9 aa, synthetic construct
AQSDCGTLF

SEQ ID NO: 2892 - protein, 9 aa, synthetic construct
AQQNRFPDQ

SEQ ID NO: 2893 - protein, 9 aa, synthetic construct
AQGNPLRTL

SEQ ID NO: 2894 - protein, 9 aa, synthetic construct
AQAYGVSSP

SEQ ID NO: 2895 - protein, 9 aa, synthetic construct
AQSGNRMTC

SEQ ID NO: 2896 - protein, 9 aa, synthetic construct
AQNTYGIDM

SEQ ID NO: 2897 - protein, 9 aa, synthetic construct
AQPIPKPNL

SEQ ID NO: 2898 - protein, 9 aa, synthetic construct
AQAVANRPM

SEQ ID NO: 2899 - protein, 9 aa, synthetic construct
AQTFLQMGS

SEQ ID NO: 2900 - protein, 9 aa, synthetic construct
AQMMTGMGL

SEQ ID NO: 2901 - protein, 9 aa, synthetic construct
AQRYGNGCV

SEQ ID NO: 2902 - protein, 9 aa, synthetic construct
AQSPLFSSP

SEQ ID NO: 2903 - protein, 9 aa, synthetic construct
AQGIGGNAR

SEQ ID NO: 2904 - protein, 9 aa, synthetic construct
AQGGIRLVR

SEQ ID NO: 2905 - protein, 9 aa, synthetic construct
AQNCEVSIY

SEQ ID NO: 2906 - protein, 9 aa, synthetic construct
AQKSVRLSY

SEQ ID NO: 2907 - protein, 9 aa, synthetic construct
AQKTDLFAI

SEQ ID NO: 2908 - protein, 9 aa, synthetic construct
AQNPVGARG

SEQ ID NO: 2909 - protein, 9 aa, synthetic construct
AQTLIRLPL

SEQ ID NO: 2910 - protein, 9 aa, synthetic construct
AQNTYFVNV

SEQ ID NO: 2911 - protein, 9 aa, synthetic construct
AQSVPWGDD

SEQ ID NO: 2912 - protein, 9 aa, synthetic construct
AQKRRTLNM

SEQ ID NO: 2913 - protein, 9 aa, synthetic construct
AQYACELVY

SEQ ID NO: 2914 - protein, 9 aa, synthetic construct
AQLIPLTRA

SEQ ID NO: 2915 - protein, 9 aa, synthetic construct
AQNHYSRLE

SEQ ID NO: 2916 - protein, 9 aa, synthetic construct
AQKMHGLGE

SEQ ID NO: 2917 - protein, 9 aa, synthetic construct
AQFIVSHNV

SEQ ID NO: 2918 - protein, 9 aa, synthetic construct
AQSVRMIQT

SEQ ID NO: 2919 - protein, 9 aa, synthetic construct
AQSIVPMGA

SEQ ID NO: 2920 - protein, 9 aa, synthetic construct
AQRELSIKD

SEQ ID NO: 2921 - protein, 9 aa, synthetic construct
AQNVTPINK

SEQ ID NO: 2922 - protein, 9 aa, synthetic construct
AQYQSPLRE

SEQ ID NO: 2923 - protein, 9 aa, synthetic construct
AQGKDRSLP

SEQ ID NO: 2924 - protein, 9 aa, synthetic construct
AQRTCDMIS

SEQ ID NO: 2925 - protein, 9 aa, synthetic construct
AQSQIKWGE

SEQ ID NO: 2926 - protein, 9 aa, synthetic construct
AQFVSVQVS

SEQ ID NO: 2927 - protein, 9 aa, synthetic construct
AQFPNPSGR

SEQ ID NO: 2928 - protein, 9 aa, synthetic construct
AQGPSISYK

SEQ ID NO: 2929 - protein, 9 aa, synthetic construct
AQAVAKGFC

SEQ ID NO: 2930 - protein, 9 aa, synthetic construct
AQQNPVLNQ

SEQ ID NO: 2931 - protein, 9 aa, synthetic construct
AQGSKTQLR

SEQ ID NO: 2932 - protein, 9 aa, synthetic construct
AQWLKLCPS

SEQ ID NO: 2933 - protein, 9 aa, synthetic construct
AQNASKSRF

SEQ ID NO: 2934 - protein, 9 aa, synthetic construct
AQRKAQAQT

SEQ ID NO: 2935 - protein, 9 aa, synthetic construct
AQTRYAQIP

SEQ ID NO: 2936 - protein, 9 aa, synthetic construct
AQRVVTSIS

SEQ ID NO: 2937 - protein, 9 aa, synthetic construct
AQKNLKHVW

SEQ ID NO: 2938 - protein, 9 aa, synthetic construct
AQTPYIFAN

SEQ ID NO: 2939 - protein, 9 aa, synthetic construct
AQSDSCFGS

SEQ ID NO: 2940 - protein, 9 aa, synthetic construct
AQPGTRASG

SEQ ID NO: 2941 - protein, 9 aa, synthetic construct
AQGRLNATT

SEQ ID NO: 2942 - protein, 9 aa, synthetic construct
AQGIIRMDT

SEQ ID NO: 2943 - protein, 9 aa, synthetic construct
AQERGMAKP

SEQ ID NO: 2944 - protein, 9 aa, synthetic construct
AQLVGIKQI

SEQ ID NO: 2945 - protein, 9 aa, synthetic construct
AQYKATLRL

SEQ ID NO: 2946 - protein, 9 aa, synthetic construct
AQAVMKRIK

SEQ ID NO: 2947 - protein, 9 aa, synthetic construct
AQLNDIVRF

SEQ ID NO: 2948 - protein, 9 aa, synthetic construct
AQKLSLSYC

SEQ ID NO: 2949 - protein, 9 aa, synthetic construct
AQSYLAMNP

SEQ ID NO: 2950 - protein, 9 aa, synthetic construct
AQRIQHLSG

SEQ ID NO: 2951 - protein, 9 aa, synthetic construct
AQDNVCDVV

SEQ ID NO: 2952 - protein, 9 aa, synthetic construct
AQPQNGINS

SEQ ID NO: 2953 - protein, 9 aa, synthetic construct
AQKADGVRE

SEQ ID NO: 2954 - protein, 9 aa, synthetic construct
AQCHDLPRI

SEQ ID NO: 2955 - protein, 9 aa, synthetic construct
AQCRVGDMK

SEQ ID NO: 2956 - protein, 9 aa, synthetic construct
AQLIGRSSS

SEQ ID NO: 2957 - protein, 9 aa, synthetic construct
AQDGHLDVV

SEQ ID NO: 2958 - protein, 9 aa, synthetic construct
AQNSKTLSA

SEQ ID NO: 2959 - protein, 9 aa, synthetic construct
AQTKWHGDE

SEQ ID NO: 2960 - protein, 9 aa, synthetic construct
AQRRMHDRL

SEQ ID NO: 2961 - protein, 9 aa, synthetic construct
AQNRDINQH

SEQ ID NO: 2962 - protein, 9 aa, synthetic construct
AQPYDPNRN

SEQ ID NO: 2963 - protein, 9 aa, synthetic construct
AQSTKRPYD

SEQ ID NO: 2964 - protein, 9 aa, synthetic construct
AQKRGMDKP

SEQ ID NO: 2965 - protein, 9 aa, synthetic construct
AQGKEVAWQ

SEQ ID NO: 2966 - protein, 9 aa, synthetic construct
AQGRYVPGD

SEQ ID NO: 2967 - protein, 9 aa, synthetic construct
AQGVVMLGG

SEQ ID NO: 2968 - protein, 9 aa, synthetic construct
AQDNYRTKG

SEQ ID NO: 2969 - protein, 9 aa, synthetic construct
AQTVISQRS

SEQ ID NO: 2970 - protein, 9 aa, synthetic construct
AQLSRSPSL

SEQ ID NO: 2971 - protein, 9 aa, synthetic construct
AQAMHAGGE

SEQ ID NO: 2972 - protein, 9 aa, synthetic construct
AQSPLRTGA

SEQ ID NO: 2973 - protein, 9 aa, synthetic construct
AQLISNSIL

SEQ ID NO: 2974 - protein, 9 aa, synthetic construct
AQTVLKQIE

SEQ ID NO: 2975 - protein, 9 aa, synthetic construct
AQVVFSQTS

SEQ ID NO: 2976 - protein, 9 aa, synthetic construct
AQTMLKLGD

SEQ ID NO: 2977 - protein, 9 aa, synthetic construct
AQPPSPRRP

SEQ ID NO: 2978 - protein, 9 aa, synthetic construct
AQVRPGISI

SEQ ID NO: 2979 - protein, 9 aa, synthetic construct
AQGKYMPSN

SEQ ID NO: 2980 - protein, 9 aa, synthetic construct
AQGILAMNG

SEQ ID NO: 2981 - protein, 9 aa, synthetic construct
AQSPYRNHS

SEQ ID NO: 2982 - protein, 9 aa, synthetic construct
AQVNRDTKP

SEQ ID NO: 2983 - protein, 9 aa, synthetic construct
AQTMVGNGM

SEQ ID NO: 2984 - protein, 9 aa, synthetic construct
AQSPFAMGT

SEQ ID NO: 2985 - protein, 9 aa, synthetic construct
AQKAGVMKA

SEQ ID NO: 2986 - protein, 9 aa, synthetic construct
AQTSYTGIS

SEQ ID NO: 2987 - protein, 9 aa, synthetic construct
AQVQSPVKN

SEQ ID NO: 2988 - protein, 9 aa, synthetic construct
AQGVVALLS

SEQ ID NO: 2989 - protein, 9 aa, synthetic construct
AQGKSLLYT

SEQ ID NO: 2990 - protein, 9 aa, synthetic construct
AQLHLGKML

SEQ ID NO: 2991 - protein, 9 aa, synthetic construct
AQARSESRT

SEQ ID NO: 2992 - protein, 9 aa, synthetic construct
AQGSGINTM

SEQ ID NO: 2993 - protein, 9 aa, synthetic construct
AQTLPKIGL

SEQ ID NO: 2994 - protein, 9 aa, synthetic construct
AQSANTGIW

SEQ ID NO: 2995 - protein, 9 aa, synthetic construct
AQTPIKGGI

SEQ ID NO: 2996 - protein, 9 aa, synthetic construct
AQKHGVASG

SEQ ID NO: 2997 - protein, 9 aa, synthetic construct
AQARGLIKA

SEQ ID NO: 2998 - protein, 9 aa, synthetic construct
AQTTCLMTF

SEQ ID NO: 2999 - protein, 9 aa, synthetic construct
AQHNSVSYL

SEQ ID NO: 3000 - protein, 9 aa, synthetic construct
AQTVLNQND

SEQ ID NO: 3001 - protein, 9 aa, synthetic construct
AQTIMVQMT

SEQ ID NO: 3002 - protein, 9 aa, synthetic construct
AQFLVNIAG

SEQ ID NO: 3003 - protein, 9 aa, synthetic construct
AQELCGTRE

SEQ ID NO: 3004 - protein, 9 aa, synthetic construct
AQKIVNDLP

SEQ ID NO: 3005 - protein, 9 aa, synthetic construct
AQPFDRNGS

SEQ ID NO: 3006 - protein, 9 aa, synthetic construct
AQVSIRSHC

SEQ ID NO: 3007 - protein, 9 aa, synthetic construct
AQDNPRFYL

SEQ ID NO: 3008 - protein, 9 aa, synthetic construct
AQKLGQDKH

SEQ ID NO: 3009 - protein, 9 aa, synthetic construct
AQMAACHTD

SEQ ID NO: 3010 - protein, 9 aa, synthetic construct
AQRMSSVNG

SEQ ID NO: 3011 - protein, 9 aa, synthetic construct
AQLHKPAER

SEQ ID NO: 3012 - protein, 9 aa, synthetic construct
AQTIVPTLK

SEQ ID NO: 3013 - protein, 9 aa, synthetic construct
AQTPIRSAS

SEQ ID NO: 3014 - protein, 9 aa, synthetic construct
AQSQTRTHL

SEQ ID NO: 3015 - protein, 9 aa, synthetic construct
AQLPLKSAN

SEQ ID NO: 3016 - protein, 9 aa, synthetic construct
AQEVRKVYS

SEQ ID NO: 3017 - protein, 9 aa, synthetic construct
AQRQLVCAH

SEQ ID NO: 3018 - protein, 9 aa, synthetic construct
AQTGQFKRD

SEQ ID NO: 3019 - protein, 9 aa, synthetic construct
AQKDNRKSN

SEQ ID NO: 3020 - protein, 9 aa, synthetic construct
AQGPIGIGG

SEQ ID NO: 3021 - protein, 9 aa, synthetic construct
AQRSIPSAC

SEQ ID NO: 3022 - protein, 9 aa, synthetic construct
AQWDCDVSK

SEQ ID NO: 3023 - protein, 9 aa, synthetic construct
AQTPVSNRQ

SEQ ID NO: 3024 - protein, 9 aa, synthetic construct
AQWKGGPTS

SEQ ID NO: 3025 - protein, 9 aa, synthetic construct
AQSCTTVGF

SEQ ID NO: 3026 - protein, 9 aa, synthetic construct
AQYVPLMHC

SEQ ID NO: 3027 - protein, 9 aa, synthetic construct
AQNLSSPRA

SEQ ID NO: 3028 - protein, 9 aa, synthetic construct
AQNQLIRHP

SEQ ID NO: 3029 - protein, 9 aa, synthetic construct
AQWINSGPS

SEQ ID NO: 3030 - protein, 9 aa, synthetic construct
AQSIMGLGL

SEQ ID NO: 3031 - protein, 9 aa, synthetic construct
AQTTVMQVL

SEQ ID NO: 3032 - protein, 9 aa, synthetic construct
AQTSFSGRG

SEQ ID NO: 3033 - protein, 9 aa, synthetic construct
AQLSSRSSP

SEQ ID NO: 3034 - protein, 9 aa, synthetic construct
AQRSAHLTR

SEQ ID NO: 3035 - protein, 9 aa, synthetic construct
AQKPGMLKV

SEQ ID NO: 3036 - protein, 9 aa, synthetic construct
AQNPRTRRD

SEQ ID NO: 3037 - protein, 9 aa, synthetic construct
AQVNQSRAY

SEQ ID NO: 3038 - protein, 9 aa, synthetic construct
AQMPIGPRP

SEQ ID NO: 3039 - protein, 9 aa, synthetic construct
AQVVITTGM

SEQ ID NO: 3040 - protein, 9 aa, synthetic construct
AQTTMKQVT

SEQ ID NO: 3041 - protein, 9 aa, synthetic construct
AQISLAQRI

SEQ ID NO: 3042 - protein, 9 aa, synthetic construct
AQKPIGMGN

SEQ ID NO: 3043 - protein, 9 aa, synthetic construct
AQLYVTSCS

SEQ ID NO: 3044 - protein, 9 aa, synthetic construct
AQGFQKWKD

SEQ ID NO: 3045 - protein, 9 aa, synthetic construct
AQSQWAGPT

SEQ ID NO: 3046 - protein, 9 aa, synthetic construct
AQWASKSGG

SEQ ID NO: 3047 - protein, 9 aa, synthetic construct
AQAQYKAQD

SEQ ID NO: 3048 - protein, 9 aa, synthetic construct
AQSPVKSGH

SEQ ID NO: 3049 - protein, 9 aa, synthetic construct
AQKMSGVGE

SEQ ID NO: 3050 - protein, 9 aa, synthetic construct
AQEGSGWRE

SEQ ID NO: 3051 - protein, 9 aa, synthetic construct
AQAMTGMGA

SEQ ID NO: 3052 - protein, 9 aa, synthetic construct
AQHPVGMGA

SEQ ID NO: 3053 - protein, 9 aa, synthetic construct
AQTASFQTS

SEQ ID NO: 3054 - protein, 9 aa, synthetic construct
AQVTSRNII

SEQ ID NO: 3055 - protein, 9 aa, synthetic construct
AQGGGLTYV

SEQ ID NO: 3056 - protein, 9 aa, synthetic construct
AQHRFMRCA

SEQ ID NO: 3057 - protein, 9 aa, synthetic construct
AQGIVRLGE

SEQ ID NO: 3058 - protein, 9 aa, synthetic construct
AQTRKCMYG

SEQ ID NO: 3059 - protein, 9 aa, synthetic construct
AQPKARLLD

SEQ ID NO: 3060 - protein, 9 aa, synthetic construct
AQGRYTGTE

SEQ ID NO: 3061 - protein, 9 aa, synthetic construct
AQDQSLVYK

SEQ ID NO: 3062 - protein, 9 aa, synthetic construct
AQCVYTLAV

SEQ ID NO: 3063 - protein, 9 aa, synthetic construct
AQLEVIYLD

SEQ ID NO: 3064 - protein, 9 aa, synthetic construct
AQIADKGMR

SEQ ID NO: 3065 - protein, 9 aa, synthetic construct
AQLTDMLIR

SEQ ID NO: 3066 - protein, 9 aa, synthetic construct
AQQLKGLAE

SEQ ID NO: 3067 - protein, 9 aa, synthetic construct
AQSPKGIYF

SEQ ID NO: 3068 - protein, 9 aa, synthetic construct
AQLMVAMGM

SEQ ID NO: 3069 - protein, 9 aa, synthetic construct
AQVKFIEPY

SEQ ID NO: 3070 - protein, 9 aa, synthetic construct
AQRWLAEEE

SEQ ID NO: 3071 - protein, 9 aa, synthetic construct
AQFLTRRYK

SEQ ID NO: 3072 - protein, 9 aa, synthetic construct
AQNLVGARG

SEQ ID NO: 3073 - protein, 9 aa, synthetic construct
AQVYASHNY

SEQ ID NO: 3074 - protein, 9 aa, synthetic construct
AQRFNDDRR

SEQ ID NO: 3075 - protein, 9 aa, synthetic construct
AQHSMASCT

SEQ ID NO: 3076 - protein, 9 aa, synthetic construct
AQVDWIEDG

SEQ ID NO: 3077 - protein, 9 aa, synthetic construct
AQSALSAMH

SEQ ID NO: 3078 - protein, 9 aa, synthetic construct
AQVIVMDIC

SEQ ID NO: 3079 - protein, 9 aa, synthetic construct
AQMTKPVSS

SEQ ID NO: 3080 - protein, 9 aa, synthetic construct
AQKISKPMR

SEQ ID NO: 3081 - protein, 9 aa, synthetic construct
AQRVGRTEG

SEQ ID NO: 3082 - protein, 9 aa, synthetic construct
AQQNSLTFR

SEQ ID NO: 3083 - protein, 9 aa, synthetic construct
AQLETCLRL

SEQ ID NO: 3084 - protein, 9 aa, synthetic construct
AQHRSVVGT

SEQ ID NO: 3085 - protein, 9 aa, synthetic construct
AQNPFQNGL

SEQ ID NO: 3086 - protein, 9 aa, synthetic construct
AQVRAARSG

SEQ ID NO: 3087 - protein, 9 aa, synthetic construct
AQTVKNQVN

SEQ ID NO: 3088 - protein, 9 aa, synthetic construct
AQQAAKVDR

SEQ ID NO: 3089 - protein, 9 aa, synthetic construct
AQWLKYTPE

SEQ ID NO: 3090 - protein, 9 aa, synthetic construct
AQIPSLRAM

SEQ ID NO: 3091 - protein, 9 aa, synthetic construct
AQDGREKFG

SEQ ID NO: 3092 - protein, 9 aa, synthetic construct
AQLYTLHDM

SEQ ID NO: 3093 - protein, 9 aa, synthetic construct
AQKFGMRSS

SEQ ID NO: 3094 - protein, 9 aa, synthetic construct
AQIKQNTYS

SEQ ID NO: 3095 - protein, 9 aa, synthetic construct
AQCSYGTNH

SEQ ID NO: 3096 - protein, 9 aa, synthetic construct
AQDLTRSCS

SEQ ID NO: 3097 - protein, 9 aa, synthetic construct
AQTATMQMS

SEQ ID NO: 3098 - protein, 9 aa, synthetic construct
AQEVSGLHI

SEQ ID NO: 3099 - protein, 9 aa, synthetic construct
AQMCGNESK

SEQ ID NO: 3100 - protein, 9 aa, synthetic construct
AQSVRQERN

SEQ ID NO: 3101 - protein, 9 aa, synthetic construct
AQKSCSSIV

SEQ ID NO: 3102 - protein, 9 aa, synthetic construct
AQLRTSTPL

SEQ ID NO: 3103 - protein, 9 aa, synthetic construct
AQDKLQTVR

SEQ ID NO: 3104 - protein, 9 aa, synthetic construct
AQRMSETRN

SEQ ID NO: 3105 - protein, 9 aa, synthetic construct
AQFVRYAHD

SEQ ID NO: 3106 - protein, 9 aa, synthetic construct
AQGKYSGIE

SEQ ID NO: 3107 - protein, 9 aa, synthetic construct
AQMPVGMGE

SEQ ID NO: 3108 - protein, 9 aa, synthetic construct
AQVSDMVRY

SEQ ID NO: 3109 - protein, 9 aa, synthetic construct
AQTVNVQIH

SEQ ID NO: 3110 - protein, 9 aa, synthetic construct
AQRLWKDEA

SEQ ID NO: 3111 - protein, 9 aa, synthetic construct
AQDSEVGAT

SEQ ID NO: 3112 - protein, 9 aa, synthetic construct
AQDPCSVAH

SEQ ID NO: 3113 - protein, 9 aa, synthetic construct
AQSNTVTNR

SEQ ID NO: 3114 - protein, 9 aa, synthetic construct
AQNRDVRLS

SEQ ID NO: 3115 - protein, 9 aa, synthetic construct
AQKREYGEV

SEQ ID NO: 3116 - protein, 9 aa, synthetic construct
AQLSCGGSK

SEQ ID NO: 3117 - protein, 9 aa, synthetic construct
AQVCLPAPL

SEQ ID NO: 3118 - protein, 9 aa, synthetic construct
AQKCIPLSR

SEQ ID NO: 3119 - protein, 9 aa, synthetic construct
AQNEISIKA

SEQ ID NO: 3120 - protein, 9 aa, synthetic construct
AQRNQNLDS

SEQ ID NO: 3121 - protein, 9 aa, synthetic construct
AQEVVAKKS

SEQ ID NO: 3122 - protein, 9 aa, synthetic construct
AQLPVKLGM

SEQ ID NO: 3123 - protein, 9 aa, synthetic construct
AQETVNCQS

SEQ ID NO: 3124 - protein, 9 aa, synthetic construct
AQHRSTYRV

SEQ ID NO: 3125 - protein, 9 aa, synthetic construct
AQRSSLSTL

SEQ ID NO: 3126 - protein, 9 aa, synthetic construct
AQLSDVKRH

SEQ ID NO: 3127 - protein, 9 aa, synthetic construct
AQVVSYCRP

SEQ ID NO: 3128 - protein, 9 aa, synthetic construct
AQSALNNSM

SEQ ID NO: 3129 - protein, 9 aa, synthetic construct
AQAKPLKSM

SEQ ID NO: 3130 - protein, 9 aa, synthetic construct
AQSVSNQID

SEQ ID NO: 3131 - protein, 9 aa, synthetic construct
AQSTLNQNS

SEQ ID NO: 3132 - protein, 9 aa, synthetic construct
AQSPLRTGE

SEQ ID NO: 3133 - protein, 9 aa, synthetic construct
AQKPARAAW

SEQ ID NO: 3134 - protein, 9 aa, synthetic construct
AQEYGLFSD

SEQ ID NO: 3135 - protein, 9 aa, synthetic construct
AQDTRSPPR

SEQ ID NO: 3136 - protein, 9 aa, synthetic construct
AQNMVGSGF

SEQ ID NO: 3137 - protein, 9 aa, synthetic construct
AQGPTGSRA

SEQ ID NO: 3138 - protein, 9 aa, synthetic construct
AQTANHGTL

SEQ ID NO: 3139 - protein, 9 aa, synthetic construct
AQSTRDFAK

SEQ ID NO: 3140 - protein, 9 aa, synthetic construct
AQSNRSPGG

SEQ ID NO: 3141 - protein, 9 aa, synthetic construct
AQYMNSSGS

SEQ ID NO: 3142 - protein, 9 aa, synthetic construct
AQNIPQYAR

SEQ ID NO: 3143 - protein, 9 aa, synthetic construct
AQSVSSGIS

SEQ ID NO: 3144 - protein, 9 aa, synthetic construct
AQQSPIGMS

SEQ ID NO: 3145 - protein, 9 aa, synthetic construct
AQPSSLLAM

SEQ ID NO: 3146 - protein, 9 aa, synthetic construct
AQWINGPPS

SEQ ID NO: 3147 - protein, 9 aa, synthetic construct
AQNTTTCRA

SEQ ID NO: 3148 - protein, 9 aa, synthetic construct
AQVCVPSNR

SEQ ID NO: 3149 - protein, 9 aa, synthetic construct
AQMKTVRLL

SEQ ID NO: 3150 - protein, 9 aa, synthetic construct
AQAAPMTVR

SEQ ID NO: 3151 - protein, 9 aa, synthetic construct
AQWTPTIMK

SEQ ID NO: 3152 - protein, 9 aa, synthetic construct
AQKNDTCAV

SEQ ID NO: 3153 - protein, 9 aa, synthetic construct
AQRHSGQLK

SEQ ID NO: 3154 - protein, 9 aa, synthetic construct
AQTTKSQLS

SEQ ID NO: 3155 - protein, 9 aa, synthetic construct
AQNADYHCL

SEQ ID NO: 3156 - protein, 9 aa, synthetic construct
AQGMKTTMS

SEQ ID NO: 3157 - protein, 9 aa, synthetic construct
AQDNRTARG

SEQ ID NO: 3158 - protein, 9 aa, synthetic construct
AQVRVCAGV

SEQ ID NO: 3159 - protein, 9 aa, synthetic construct
AQGSGRPTF

SEQ ID NO: 3160 - protein, 9 aa, synthetic construct
AQTVLPRLS

SEQ ID NO: 3161 - protein, 9 aa, synthetic construct
AQRLVGGSP

SEQ ID NO: 3162 - protein, 9 aa, synthetic construct
AQMHSGHTC

SEQ ID NO: 3163 - protein, 9 aa, synthetic construct
AQTVMAQVL

SEQ ID NO: 3164 - protein, 9 aa, synthetic construct
AQMVVKLGC

SEQ ID NO: 3165 - protein, 9 aa, synthetic construct
AQAGMAMPR

SEQ ID NO: 3166 - protein, 9 aa, synthetic construct
AQILVDVCT

SEQ ID NO: 3167 - protein, 9 aa, synthetic construct
AQFEYMMCH

SEQ ID NO: 3168 - protein, 9 aa, synthetic construct
AQHTDKEML

SEQ ID NO: 3169 - protein, 9 aa, synthetic construct
AQSREISGC

SEQ ID NO: 3170 - protein, 9 aa, synthetic construct
AQKLVAKES

SEQ ID NO: 3171 - protein, 9 aa, synthetic construct
AQNRLGQVK

SEQ ID NO: 3172 - protein, 9 aa, synthetic construct
AQRLIATSV

SEQ ID NO: 3173 - protein, 9 aa, synthetic construct
AQVVNYQVS

SEQ ID NO: 3174 - protein, 9 aa, synthetic construct
AQISSFVRQ

SEQ ID NO: 3175 - protein, 9 aa, synthetic construct
AQPMCTVMP

SEQ ID NO: 3176 - protein, 9 aa, synthetic construct
AQSQSNRLC

SEQ ID NO: 3177 - protein, 9 aa, synthetic construct
AQMNSRFDT

SEQ ID NO: 3178 - protein, 9 aa, synthetic construct
AQSPIKFGS

SEQ ID NO: 3179 - protein, 9 aa, synthetic construct
AQQMIRLSE

SEQ ID NO: 3180 - protein, 9 aa, synthetic construct
AQCRELPPR

SEQ ID NO: 3181 - protein, 9 aa, synthetic construct
AQAKHDELV

SEQ ID NO: 3182 - protein, 9 aa, synthetic construct
AQDGSRVKG

SEQ ID NO: 3183 - protein, 9 aa, synthetic construct
AQHPGAAKA

SEQ ID NO: 3184 - protein, 9 aa, synthetic construct
AQWRGSAKT

SEQ ID NO: 3185 - protein, 9 aa, synthetic construct
AQKKDMTCQ

SEQ ID NO: 3186 - protein, 9 aa, synthetic construct
AQVNNACRI

SEQ ID NO: 3187 - protein, 9 aa, synthetic construct
AQLPKHMNV

SEQ ID NO: 3188 - protein, 9 aa, synthetic construct
AQPYRAQSS

SEQ ID NO: 3189 - protein, 9 aa, synthetic construct
AQDVIRIGA

SEQ ID NO: 3190 - protein, 9 aa, synthetic construct
AQQIQHTIR

SEQ ID NO: 3191 - protein, 9 aa, synthetic construct
AQGSLTCGH

SEQ ID NO: 3192 - protein, 9 aa, synthetic construct
AQSYLVGVG

SEQ ID NO: 3193 - protein, 9 aa, synthetic construct
AQQLSAKCR

SEQ ID NO: 3194 - protein, 9 aa, synthetic construct
AQMDESAHC

SEQ ID NO: 3195 - protein, 9 aa, synthetic construct
AQGVVRENG

SEQ ID NO: 3196 - protein, 9 aa, synthetic construct
AQLLESVQV

SEQ ID NO: 3197 - protein, 9 aa, synthetic construct
AQLDALFAR

SEQ ID NO: 3198 - protein, 9 aa, synthetic construct
AQGSGLHCA

SEQ ID NO: 3199 - protein, 9 aa, synthetic construct
AQWVSHTVV

SEQ ID NO: 3200 - protein, 9 aa, synthetic construct
AQAFVKTSA

SEQ ID NO: 3201 - protein, 9 aa, synthetic construct
AQVGMSGLC

SEQ ID NO: 3202 - protein, 9 aa, synthetic construct
AQLQIPACG

SEQ ID NO: 3203 - protein, 9 aa, synthetic construct
AQGLVRMNS

SEQ ID NO: 3204 - protein, 9 aa, synthetic construct
AQADSLHVY

SEQ ID NO: 3205 - protein, 9 aa, synthetic construct
AQNVLTLGL

SEQ ID NO: 3206 - protein, 9 aa, synthetic construct
AQCRFIPKS

SEQ ID NO: 3207 - protein, 9 aa, synthetic construct
AQGSLNKCP

SEQ ID NO: 3208 - protein, 9 aa, synthetic construct
AQTYNENSL

SEQ ID NO: 3209 - protein, 9 aa, synthetic construct
AQSLYVSSK

SEQ ID NO: 3210 - protein, 9 aa, synthetic construct
AQTTMHSGC

SEQ ID NO: 3211 - protein, 9 aa, synthetic construct
AQNFQYQVS

SEQ ID NO: 3212 - protein, 9 aa, synthetic construct
AQPSSVHRL

SEQ ID NO: 3213 - protein, 9 aa, synthetic construct
AQSKLTTVS

SEQ ID NO: 3214 - protein, 9 aa, synthetic construct
AQMDNRYDN

SEQ ID NO: 3215 - protein, 9 aa, synthetic construct
AQSQNPVQF

SEQ ID NO: 3216 - protein, 9 aa, synthetic construct
AQTTNLLKW

SEQ ID NO: 3217 - protein, 9 aa, synthetic construct
AQHADKLRQ

SEQ ID NO: 3218 - protein, 9 aa, synthetic construct
AQITTKMSY

SEQ ID NO: 3219 - protein, 9 aa, synthetic construct
AQGKTAECA

SEQ ID NO: 3220 - protein, 9 aa, synthetic construct
AQPWRDNCT

SEQ ID NO: 3221 - protein, 9 aa, synthetic construct
AQKGYAEMI

SEQ ID NO: 3222 - protein, 9 aa, synthetic construct
AQYNPVKAG

SEQ ID NO: 3223 - protein, 9 aa, synthetic construct
AQTSGRPSL

SEQ ID NO: 3224 - protein, 9 aa, synthetic construct
AQAMSGAYL

SEQ ID NO: 3225 - protein, 9 aa, synthetic construct
AQNMLGLGQ

SEQ ID NO: 3226 - protein, 9 aa, synthetic construct
AQSTSTHNY

SEQ ID NO: 3227 - protein, 9 aa, synthetic construct
AQAPLLPGH

SEQ ID NO: 3228 - protein, 9 aa, synthetic construct
AQLARARGD

SEQ ID NO: 3229 - protein, 9 aa, synthetic construct
AQVGFLYSF

SEQ ID NO: 3230 - protein, 9 aa, synthetic construct
AQLRGSASK

SEQ ID NO: 3231 - protein, 9 aa, synthetic construct
AQCYGDVDT

SEQ ID NO: 3232 - protein, 9 aa, synthetic construct
AQNSGRVLC

SEQ ID NO: 3233 - protein, 9 aa, synthetic construct
AQTTRSLSY

SEQ ID NO: 3234 - protein, 9 aa, synthetic construct
AQSPTRYGE

SEQ ID NO: 3235 - protein, 9 aa, synthetic construct
AQYGGTKNC

SEQ ID NO: 3236 - protein, 9 aa, synthetic construct
AQSLCKTYV

SEQ ID NO: 3237 - protein, 9 aa, synthetic construct
AQNLKNCTY

SEQ ID NO: 3238 - protein, 9 aa, synthetic construct
AQTSGRLMS

SEQ ID NO: 3239 - protein, 9 aa, synthetic construct
AQAMPRVQG

SEQ ID NO: 3240 - protein, 9 aa, synthetic construct
AQLGPNVKP

SEQ ID NO: 3241 - protein, 9 aa, synthetic construct
AQRGLANAL

SEQ ID NO: 3242 - protein, 9 aa, synthetic construct
AQYSLVRIC

SEQ ID NO: 3243 - protein, 9 aa, synthetic construct
AQIHIDDPY

SEQ ID NO: 3244 - protein, 9 aa, synthetic construct
AQNSYGRVM

SEQ ID NO: 3245 - protein, 9 aa, synthetic construct
AQTSKMSAH

SEQ ID NO: 3246 - protein, 9 aa, synthetic construct
AQTVRAQIT

SEQ ID NO: 3247 - protein, 9 aa, synthetic construct
AQRENGRNS

SEQ ID NO: 3248 - protein, 9 aa, synthetic construct
AQVSKVLPC

SEQ ID NO: 3249 - protein, 9 aa, synthetic construct
AQRPTSLSQ

SEQ ID NO: 3250 - protein, 9 aa, synthetic construct
AQLCSDGMH

SEQ ID NO: 3251 - protein, 9 aa, synthetic construct
AQDVVRQGY

SEQ ID NO: 3252 - protein, 9 aa, synthetic construct
AQWESGTYA

SEQ ID NO: 3253 - protein, 9 aa, synthetic construct
AQTVKQMGS

SEQ ID NO: 3254 - protein, 9 aa, synthetic construct
AQMSRATVP

SEQ ID NO: 3255 - protein, 9 aa, synthetic construct
AQADLGMCQ

SEQ ID NO: 3256 - protein, 9 aa, synthetic construct
AQQQRGTPM

SEQ ID NO: 3257 - protein, 9 aa, synthetic construct
AQCRERAGS

SEQ ID NO: 3258 - protein, 9 aa, synthetic construct
AQRHGSPDK

SEQ ID NO: 3259 - protein, 9 aa, synthetic construct
AQKEGLNKG

SEQ ID NO: 3260 - protein, 9 aa, synthetic construct
AQSDTRVPS

SEQ ID NO: 3261 - protein, 9 aa, synthetic construct
AQVMRCLDR

SEQ ID NO: 3262 - protein, 9 aa, synthetic construct
AQSPATATD

SEQ ID NO: 3263 - protein, 9 aa, synthetic construct
AQQSPIAGV

SEQ ID NO: 3264 - protein, 9 aa, synthetic construct
AQPRAATAH

SEQ ID NO: 3265 - protein, 9 aa, synthetic construct
AQTSCSSPL

SEQ ID NO: 3266 - protein, 9 aa, synthetic construct
AQKQSGSGK

SEQ ID NO: 3267 - protein, 9 aa, synthetic construct
AQRLQSVLG

SEQ ID NO: 3268 - protein, 9 aa, synthetic construct
AQSPSLPCI

SEQ ID NO: 3269 - protein, 9 aa, synthetic construct
AQQIASMNA

SEQ ID NO: 3270 - protein, 9 aa, synthetic construct
AQWLTTHNV

SEQ ID NO: 3271 - protein, 9 aa, synthetic construct
AQNRLSSIG

SEQ ID NO: 3272 - protein, 9 aa, synthetic construct
AQRSAERLP

SEQ ID NO: 3273 - protein, 9 aa, synthetic construct
AQGARGNWV

SEQ ID NO: 3274 - protein, 9 aa, synthetic construct
AQPAKFAYD

SEQ ID NO: 3275 - protein, 9 aa, synthetic construct
AQRGEAITK

SEQ ID NO: 3276 - protein, 9 aa, synthetic construct
AQGGHFLKA

SEQ ID NO: 3277 - protein, 9 aa, synthetic construct
AQRNFPTAI

SEQ ID NO: 3278 - protein, 9 aa, synthetic construct
AQIYTPKTA

SEQ ID NO: 3279 - protein, 9 aa, synthetic construct
AQVAPRDKL

SEQ ID NO: 3280 - protein, 9 aa, synthetic construct
AQFQNPVDF

SEQ ID NO: 3281 - protein, 9 aa, synthetic construct
AQSIIAMGL

SEQ ID NO: 3282 - protein, 9 aa, synthetic construct
AQSVWTGSV

SEQ ID NO: 3283 - protein, 9 aa, synthetic construct
AQEPCYTNT

SEQ ID NO: 3284 - protein, 9 aa, synthetic construct
AQCDGRCLG

SEQ ID NO: 3285 - protein, 9 aa, synthetic construct
AQNPVGARV

SEQ ID NO: 3286 - protein, 9 aa, synthetic construct
AQSCDLAAY

SEQ ID NO: 3287 - protein, 9 aa, synthetic construct
AQNFRRPNA

SEQ ID NO: 3288 - protein, 9 aa, synthetic construct
AQLKLNIKA

SEQ ID NO: 3289 - protein, 9 aa, synthetic construct
AQGMLECHF

SEQ ID NO: 3290 - protein, 9 aa, synthetic construct
AQRGACATS

SEQ ID NO: 3291 - protein, 9 aa, synthetic construct
AQNQSLERV

SEQ ID NO: 3292 - protein, 9 aa, synthetic construct
AQYSALVAQ

SEQ ID NO: 3293 - protein, 9 aa, synthetic construct
AQTNSSSTK

SEQ ID NO: 3294 - protein, 9 aa, synthetic construct
AQESSCTRD

SEQ ID NO: 3295 - protein, 9 aa, synthetic construct
AQVHTLCAH

SEQ ID NO: 3296 - protein, 9 aa, synthetic construct
AQSAGCYLM

SEQ ID NO: 3297 - protein, 9 aa, synthetic construct
AQTRRAGED

SEQ ID NO: 3298 - protein, 9 aa, synthetic construct
AQRRTSSEC

SEQ ID NO: 3299 - protein, 9 aa, synthetic construct
AQVRAVDKT

SEQ ID NO: 3300 - protein, 9 aa, synthetic construct
AQDMASLKC

SEQ ID NO: 3301 - protein, 9 aa, synthetic construct
AQRVGCTSY

SEQ ID NO: 3302 - protein, 9 aa, synthetic construct
AQTLSFQNS

SEQ ID NO: 3303 - protein, 9 aa, synthetic construct
AQMQSPKKQ

SEQ ID NO: 3304 - protein, 9 aa, synthetic construct
AQTPVHMGS

SEQ ID NO: 3305 - protein, 9 aa, synthetic construct
AQGNLDCVY

SEQ ID NO: 3306 - protein, 9 aa, synthetic construct
AQQRNNALS

SEQ ID NO: 3307 - protein, 9 aa, synthetic construct
AQTQRPSPQ

SEQ ID NO: 3308 - protein, 9 aa, synthetic construct
AQRAQERRD

SEQ ID NO: 3309 - protein, 9 aa, synthetic construct
AQQYDPNGT

SEQ ID NO: 3310 - protein, 9 aa, synthetic construct
AQPRNAGSN

SEQ ID NO: 3311 - protein, 9 aa, synthetic construct
AQRMSSCTN

SEQ ID NO: 3312 - protein, 9 aa, synthetic construct
AQDYQRKPT

SEQ ID NO: 3313 - protein, 9 aa, synthetic construct
AQSLKRQIE

SEQ ID NO: 3314 - protein, 9 aa, synthetic construct
AQGRYRALE

SEQ ID NO: 3315 - protein, 9 aa, synthetic construct
AQTRPVTVS

SEQ ID NO: 3316 - protein, 9 aa, synthetic construct
AQHDMNCTR

SEQ ID NO: 3317 - protein, 9 aa, synthetic construct
AQTWSTGAS

SEQ ID NO: 3318 - protein, 9 aa, synthetic construct
AQTVVAQKA

SEQ ID NO: 3319 - protein, 9 aa, synthetic construct
AQFSSTSGK

SEQ ID NO: 3320 - protein, 9 aa, synthetic construct
AQGIKFTPN

SEQ ID NO: 3321 - protein, 9 aa, synthetic construct
AQWSKSFRT

SEQ ID NO: 3322 - protein, 9 aa, synthetic construct
AQDASVALR

SEQ ID NO: 3323 - protein, 9 aa, synthetic construct
AQDWDHCAE

SEQ ID NO: 3324 - protein, 9 aa, synthetic construct
AQGGLPDGH

SEQ ID NO: 3325 - protein, 9 aa, synthetic construct
AQRCGGQHI

SEQ ID NO: 3326 - protein, 9 aa, synthetic construct
AQRLFATAV

SEQ ID NO: 3327 - protein, 9 aa, synthetic construct
AQPLECGMV

SEQ ID NO: 3328 - protein, 9 aa, synthetic construct
AQMYVDWHV

SEQ ID NO: 3329 - protein, 9 aa, synthetic construct
AQLSSALDD

SEQ ID NO: 3330 - protein, 9 aa, synthetic construct
AQDDNSERC

SEQ ID NO: 3331 - protein, 9 aa, synthetic construct
AQRDRCDQP

SEQ ID NO: 3332 - protein, 9 aa, synthetic construct
AQKSGGCAG

SEQ ID NO: 3333 - protein, 9 aa, synthetic construct
AQCLKSKSA

SEQ ID NO: 3334 - protein, 9 aa, synthetic construct
AQKISSHNT

SEQ ID NO: 3335 - protein, 9 aa, synthetic construct
AQSGHLMLT

SEQ ID NO: 3336 - protein, 9 aa, synthetic construct
AQFEYSPIV

SEQ ID NO: 3337 - protein, 9 aa, synthetic construct
AQVSTVMGT

SEQ ID NO: 3338 - protein, 9 aa, synthetic construct
AQRMVVAAA

SEQ ID NO: 3339 - protein, 9 aa, synthetic construct
AQETADHDW

SEQ ID NO: 3340 - protein, 9 aa, synthetic construct
AQFTSGRAR

SEQ ID NO: 3341 - protein, 9 aa, synthetic construct
AQIKGIRCP

SEQ ID NO: 3342 - protein, 9 aa, synthetic construct
AQPGARPVM

SEQ ID NO: 3343 - protein, 9 aa, synthetic construct
AQQRYCYGP

SEQ ID NO: 3344 - protein, 9 aa, synthetic construct
AQSDVECQV

SEQ ID NO: 3345 - protein, 9 aa, synthetic construct
AQGLRGCGM

SEQ ID NO: 3346 - protein, 9 aa, synthetic construct
AQQKIGMCT

SEQ ID NO: 3347 - protein, 9 aa, synthetic construct
AQVPKEIHR

SEQ ID NO: 3348 - protein, 9 aa, synthetic construct
AQSVSPVDQ

SEQ ID NO: 3349 - protein, 9 aa, synthetic construct
AQYLASKFR

SEQ ID NO: 3350 - protein, 9 aa, synthetic construct
AQREQSSRA

SEQ ID NO: 3351 - protein, 9 aa, synthetic construct
AQTGGSITC

SEQ ID NO: 3352 - protein, 9 aa, synthetic construct
AQGGGPRNG

SEQ ID NO: 3353 - protein, 9 aa, synthetic construct
AQKAGAVKA

SEQ ID NO: 3354 - protein, 9 aa, synthetic construct
AQPVSMCVS

SEQ ID NO: 3355 - protein, 9 aa, synthetic construct
AQLSDNSIN

SEQ ID NO: 3356 - protein, 9 aa, synthetic construct
AQQSSRGNL

SEQ ID NO: 3357 - protein, 9 aa, synthetic construct
AQTGLCAAG

SEQ ID NO: 3358 - protein, 9 aa, synthetic construct
AQNPVGVRG

SEQ ID NO: 3359 - protein, 9 aa, synthetic construct
AQCDWESRV

SEQ ID NO: 3360 - protein, 9 aa, synthetic construct
AQVMTKLGP

SEQ ID NO: 3361 - protein, 9 aa, synthetic construct
AQYSPSVLR

SEQ ID NO: 3362 - protein, 9 aa, synthetic construct
AQLSDARRY

SEQ ID NO: 3363 - protein, 9 aa, synthetic construct
AQTTLRQVT

SEQ ID NO: 3364 - protein, 9 aa, synthetic construct
AQKSSLSSV

SEQ ID NO: 3365 - protein, 9 aa, synthetic construct
AQLRIQPAC

SEQ ID NO: 3366 - protein, 9 aa, synthetic construct
AQKGPMRAL

SEQ ID NO: 3367 - protein, 9 aa, synthetic construct
AQQMYEREF

SEQ ID NO: 3368 - protein, 9 aa, synthetic construct
AQSRSLTPN

SEQ ID NO: 3369 - protein, 9 aa, synthetic construct
AQFNRLSDS

SEQ ID NO: 3370 - protein, 9 aa, synthetic construct
AQVGSEAGS

SEQ ID NO: 3371 - protein, 9 aa, synthetic construct
AQTLTSSHA

SEQ ID NO: 3372 - protein, 9 aa, synthetic construct
AQSQRVVIT

SEQ ID NO: 3373 - protein, 9 aa, synthetic construct
AQGPPHRVS

SEQ ID NO: 3374 - protein, 9 aa, synthetic construct
AQLHICDGF

SEQ ID NO: 3375 - protein, 9 aa, synthetic construct
AQKFKNACV

SEQ ID NO: 3376 - protein, 9 aa, synthetic construct
AQFVTSMKC

SEQ ID NO: 3377 - protein, 9 aa, synthetic construct
AQGAKCSSP

SEQ ID NO: 3378 - protein, 9 aa, synthetic construct
AQIQSPVGV

SEQ ID NO: 3379 - protein, 9 aa, synthetic construct
AQESLMKGS

SEQ ID NO: 3380 - protein, 9 aa, synthetic construct
AQCSTGDLG

SEQ ID NO: 3381 - protein, 9 aa, synthetic construct
AQISRGSVP

SEQ ID NO: 3382 - protein, 9 aa, synthetic construct
AQRIRDSET

SEQ ID NO: 3383 - protein, 9 aa, synthetic construct
AQVTINQYG

SEQ ID NO: 3384 - protein, 9 aa, synthetic construct
AQWPWEVDV

SEQ ID NO: 3385 - protein, 9 aa, synthetic construct
AQRSKLGKS

SEQ ID NO: 3386 - protein, 9 aa, synthetic construct
AQSPLRDGE

SEQ ID NO: 3387 - protein, 9 aa, synthetic construct
AQLSSRAAP

SEQ ID NO: 3388 - protein, 9 aa, synthetic construct
AQQCISGEA

SEQ ID NO: 3389 - protein, 9 aa, synthetic construct
AQQDFRLGS

SEQ ID NO: 3390 - protein, 9 aa, synthetic construct
AQRRMRPVE

SEQ ID NO: 3391 - protein, 9 aa, synthetic construct
AQDKFICST

SEQ ID NO: 3392 - protein, 9 aa, synthetic construct
AQLTKTFTP

SEQ ID NO: 3393 - protein, 9 aa, synthetic construct
AQVKTCKVV

SEQ ID NO: 3394 - protein, 9 aa, synthetic construct
AQMHMPVMR

SEQ ID NO: 3395 - protein, 9 aa, synthetic construct
AQTQGANSV

SEQ ID NO: 3396 - protein, 9 aa, synthetic construct
AQAISGLKC

SEQ ID NO: 3397 - protein, 9 aa, synthetic construct
AQRSELSHR

SEQ ID NO: 3398 - protein, 9 aa, synthetic construct
AQGSDFLGT

SEQ ID NO: 3399 - protein, 9 aa, synthetic construct
AQCNELVVR

SEQ ID NO: 3400 - protein, 9 aa, synthetic construct
AQNQGTLRS

SEQ ID NO: 3401 - protein, 9 aa, synthetic construct
AQTVPHVKG

SEQ ID NO: 3402 - protein, 9 aa, synthetic construct
AQDTLVKHC

SEQ ID NO: 3403 - protein, 9 aa, synthetic construct
AQQYTRKYV

SEQ ID NO: 3404 - protein, 9 aa, synthetic construct
AQNSAMRLT

SEQ ID NO: 3405 - protein, 9 aa, synthetic construct
AQMYTTHNV

SEQ ID NO: 3406 - protein, 9 aa, synthetic construct
AQFLTKCGS

SEQ ID NO: 3407 - protein, 9 aa, synthetic construct
AQTHSEDRN

SEQ ID NO: 3408 - protein, 9 aa, synthetic construct
AQAEEECDW

SEQ ID NO: 3409 - protein, 9 aa, synthetic construct
AQRGKGSST

SEQ ID NO: 3410 - protein, 9 aa, synthetic construct
AQNESIVFF

SEQ ID NO: 3411 - protein, 9 aa, synthetic construct
AQCDSGKLK

SEQ ID NO: 3412 - protein, 9 aa, synthetic construct
AQLCTGGRY

SEQ ID NO: 3413 - protein, 9 aa, synthetic construct
AQTAVLGVP

SEQ ID NO: 3414 - protein, 9 aa, synthetic construct
AQNCMSNGG

SEQ ID NO: 3415 - protein, 9 aa, synthetic construct
AQTCHKPSA

SEQ ID NO: 3416 - protein, 9 aa, synthetic construct
AQMQIHNCP

SEQ ID NO: 3417 - protein, 9 aa, synthetic construct
AQSYDLKGH

SEQ ID NO: 3418 - protein, 9 aa, synthetic construct
AQGGSTECM

SEQ ID NO: 3419 - protein, 9 aa, synthetic construct
AQGSYSYVT

SEQ ID NO: 3420 - protein, 9 aa, synthetic construct
AQSVIKPRS

SEQ ID NO: 3421 - protein, 9 aa, synthetic construct
AQHGMLAHF

SEQ ID NO: 3422 - protein, 9 aa, synthetic construct
AQSVHFRCG

SEQ ID NO: 3423 - protein, 9 aa, synthetic construct
AQLLHDSVK

SEQ ID NO: 3424 - protein, 9 aa, synthetic construct
AQLHMSPRG

SEQ ID NO: 3425 - protein, 9 aa, synthetic construct
AQIIIKMLR

SEQ ID NO: 3426 - protein, 9 aa, synthetic construct
AQAIETRTE

SEQ ID NO: 3427 - protein, 9 aa, synthetic construct
AQCWEVDKR

SEQ ID NO: 3428 - protein, 9 aa, synthetic construct
AQYERFKQV

SEQ ID NO: 3429 - protein, 9 aa, synthetic construct
AQSDLPYSV

SEQ ID NO: 3430 - protein, 9 aa, synthetic construct
AQIDATGRC

SEQ ID NO: 3431 - protein, 9 aa, synthetic construct
AQLYELMAK

SEQ ID NO: 3432 - protein, 9 aa, synthetic construct
AQVLDNFCP

SEQ ID NO: 3433 - protein, 9 aa, synthetic construct
AQTDCKPRS

SEQ ID NO: 3434 - protein, 9 aa, synthetic construct
AQFVPCLGT

SEQ ID NO: 3435 - protein, 9 aa, synthetic construct
AQWWQKCKQ

SEQ ID NO: 3436 - protein, 9 aa, synthetic construct
AQLDSHSPT

SEQ ID NO: 3437 - protein, 9 aa, synthetic construct
AQSFTTYSL

SEQ ID NO: 3438 - protein, 9 aa, synthetic construct
AQVIESHAA

SEQ ID NO: 3439 - protein, 9 aa, synthetic construct
AQKNDRCSP

SEQ ID NO: 3440 - protein, 9 aa, synthetic construct
AQERGTCLE

SEQ ID NO: 3441 - protein, 9 aa, synthetic construct
AQAAVASVN

SEQ ID NO: 3442 - protein, 9 aa, synthetic construct
AQQASCGAV

SEQ ID NO: 3443 - protein, 9 aa, synthetic construct
AQVIPYCSS

SEQ ID NO: 3444 - protein, 9 aa, synthetic construct
AQVTSNGCT

SEQ ID NO: 3445 - protein, 9 aa, synthetic construct
AQCLSRAGK

SEQ ID NO: 3446 - protein, 9 aa, synthetic construct
AQKSTQMYM

SEQ ID NO: 3447 - protein, 9 aa, synthetic construct
DGDNYAERG

SEQ ID NO: 3448 - protein, 9 aa, synthetic construct
DGEADRWLS

SEQ ID NO: 3449 - protein, 9 aa, synthetic construct
DGVYGLEAI

SEQ ID NO: 3450 - protein, 9 aa, synthetic construct
DGQNSLSFK

SEQ ID NO: 3451 - protein, 9 aa, synthetic construct
DGTTYYLYS

SEQ ID NO: 3452 - protein, 9 aa, synthetic construct
DGLKLILKG

SEQ ID NO: 3453 - protein, 9 aa, synthetic construct
DGSSSYEGQ

SEQ ID NO: 3454 - protein, 9 aa, synthetic construct
DGDNYTITP

SEQ ID NO: 3455 - protein, 9 aa, synthetic construct
DGMNDASLF

SEQ ID NO: 3456 - protein, 9 aa, synthetic construct
DGKVGQSRE

SEQ ID NO: 3457 - protein, 9 aa, synthetic construct
DGMTGLSKP

SEQ ID NO: 3458 - protein, 9 aa, synthetic construct
DGFVFSDAL

SEQ ID NO: 3459 - protein, 9 aa, synthetic construct
DGSGRDTPR

SEQ ID NO: 3460 - protein, 9 aa, synthetic construct
DGSVVSGMQ

SEQ ID NO: 3461 - protein, 9 aa, synthetic construct
DGLSPGRFL

SEQ ID NO: 3462 - protein, 9 aa, synthetic construct
DGCHPYHAP

SEQ ID NO: 3463 - protein, 9 aa, synthetic construct
DGRSKRQPS

SEQ ID NO: 3464 - protein, 9 aa, synthetic construct
DGADDISTY

SEQ ID NO: 3465 - protein, 9 aa, synthetic construct
DGLISRHGA

SEQ ID NO: 3466 - protein, 9 aa, synthetic construct
DGIPRSADH

SEQ ID NO: 3467 - protein, 9 aa, synthetic construct
DGEEAPWKM

SEQ ID NO: 3468 - protein, 9 aa, synthetic construct
DGWIENDSA

SEQ ID NO: 3469 - protein, 9 aa, synthetic construct
DGNLCIKTY

SEQ ID NO: 3470 - protein, 9 aa, synthetic construct
DGDEMRRDV

SEQ ID NO: 3471 - protein, 9 aa, synthetic construct
DGTRRATPD

SEQ ID NO: 3472 - protein, 9 aa, synthetic construct
DGKQYVKSA

SEQ ID NO: 3473 - protein, 9 aa, synthetic construct
DGPKNYVPP

SEQ ID NO: 3474 - protein, 9 aa, synthetic construct
DGKWVQPDT

SEQ ID NO: 3475 - protein, 9 aa, synthetic construct
DGDSFADLY

SEQ ID NO: 3476 - protein, 9 aa, synthetic construct
DGRVYVSLK

SEQ ID NO: 3477 - protein, 9 aa, synthetic construct
DGNRNNNTL

SEQ ID NO: 3478 - protein, 9 aa, synthetic construct
DGVHRNQVD

SEQ ID NO: 3479 - protein, 9 aa, synthetic construct
DGKVPKSQL

SEQ ID NO: 3480 - protein, 9 aa, synthetic construct
DGAKTNGYD

SEQ ID NO: 3481 - protein, 9 aa, synthetic construct
DGLIGHTKA

SEQ ID NO: 3482 - protein, 9 aa, synthetic construct
DGSARYTGN

SEQ ID NO: 3483 - protein, 9 aa, synthetic construct
DGMQRIAHL

SEQ ID NO: 3484 - protein, 9 aa, synthetic construct
DGMRKTLEN

SEQ ID NO: 3485 - protein, 9 aa, synthetic construct
DGYDDECMP

SEQ ID NO: 3486 - protein, 9 aa, synthetic construct
DGRLPCAMI

SEQ ID NO: 3487 - protein, 9 aa, synthetic construct
DGLFAEMTN

SEQ ID NO: 3488 - protein, 9 aa, synthetic construct
DGESVRPMR

SEQ ID NO: 3489 - protein, 9 aa, synthetic construct
DGIEGTWRS

SEQ ID NO: 3490 - protein, 9 aa, synthetic construct
DGYDDSSDY

SEQ ID NO: 3491 - protein, 9 aa, synthetic construct
DGNHITEEI

SEQ ID NO: 3492 - protein, 9 aa, synthetic construct
DGRRILIDA

SEQ ID NO: 3493 - protein, 9 aa, synthetic construct
DGTKHKSKV

SEQ ID NO: 3494 - protein, 9 aa, synthetic construct
DGRFKDVGF

SEQ ID NO: 3495 - protein, 9 aa, synthetic construct
DGVHNSRPE

SEQ ID NO: 3496 - protein, 9 aa, synthetic construct
DGYNEEWRD

SEQ ID NO: 3497 - protein, 9 aa, synthetic construct
DGTNVTRKP

SEQ ID NO: 3498 - protein, 9 aa, synthetic construct
DGKYAACEG

SEQ ID NO: 3499 - protein, 9 aa, synthetic construct
DGYDRSYAG

SEQ ID NO: 3500 - protein, 9 aa, synthetic construct
DGHHGNEPW

SEQ ID NO: 3501 - protein, 9 aa, synthetic construct
DGGGSMSTW

SEQ ID NO: 3502 - protein, 9 aa, synthetic construct
DGLMTHVDC

SEQ ID NO: 3503 - protein, 9 aa, synthetic construct
DGCMMRLPQ

SEQ ID NO: 3504 - protein, 9 aa, synthetic construct
DGYADVSSN

SEQ ID NO: 3505 - protein, 9 aa, synthetic construct
DGPAIHVPR

SEQ ID NO: 3506 - protein, 9 aa, synthetic construct
DGFRSSIGT

SEQ ID NO: 3507 - protein, 9 aa, synthetic construct
DGQHPVRQG

SEQ ID NO: 3508 - protein, 9 aa, synthetic construct
DGSNKRLVN

SEQ ID NO: 3509 - protein, 9 aa, synthetic construct
DGVAGQMRA

SEQ ID NO: 3510 - protein, 9 aa, synthetic construct
DGVSWKISE

SEQ ID NO: 3511 - protein, 9 aa, synthetic construct
DGRTRFLEA

SEQ ID NO: 3512 - protein, 9 aa, synthetic construct
DGDELPVVD

SEQ ID NO: 3513 - protein, 9 aa, synthetic construct
DGDGREKFG

SEQ ID NO: 3514 - protein, 9 aa, synthetic construct
DGKKRPYAH

SEQ ID NO: 3515 - protein, 9 aa, synthetic construct
DGDHVSAVR

SEQ ID NO: 3516 - protein, 9 aa, synthetic construct
DGYYRETEA

SEQ ID NO: 3517 - protein, 9 aa, synthetic construct
DGPTRMPEI

SEQ ID NO: 3518 - protein, 9 aa, synthetic construct
DGCLKVMRC

SEQ ID NO: 3519 - protein, 9 aa, synthetic construct
DGGHFNSCK

SEQ ID NO: 3520 - protein, 9 aa, synthetic construct
DGGTGSLCD

SEQ ID NO: 3521 - protein, 9 aa, synthetic construct
DGSAENQEW

SEQ ID NO: 3522 - protein, 9 aa, synthetic construct
DGWLRCAGR

SEQ ID NO: 3523 - protein, 9 aa, synthetic construct
DGIIEAWRD

SEQ ID NO: 3524 - protein, 9 aa, synthetic construct
DGLEQRGGT

SEQ ID NO: 3525 - protein, 9 aa, synthetic construct
DGGFMPRHG

SEQ ID NO: 3526 - protein, 9 aa, synthetic construct
DGYFCRECV

SEQ ID NO: 3527 - protein, 9 aa, synthetic construct
DGTMQSKRR

SEQ ID NO: 3528 - protein, 9 aa, synthetic construct
DGPSQNMCT

SEQ ID NO: 3529 - protein, 9 aa, synthetic construct
DGKSNMRIP

SEQ ID NO: 3530 - protein, 9 aa, synthetic construct
DGHNWGRAE

SEQ ID NO: 3531 - protein, 9 aa, synthetic construct
DGSFGFFRT

SEQ ID NO: 3532 - protein, 9 aa, synthetic construct
DGSVTPKNQ

SEQ ID NO: 3533 - protein, 9 aa, synthetic construct
DGKKRASAG

SEQ ID NO: 3534 - protein, 9 aa, synthetic construct
DGDGYLYKG

SEQ ID NO: 3535 - protein, 9 aa, synthetic construct
DGRMMSLPL

SEQ ID NO: 3536 - protein, 9 aa, synthetic construct
DGVGGRNKK

SEQ ID NO: 3537 - protein, 9 aa, synthetic construct
DGRVVKALP

SEQ ID NO: 3538 - protein, 9 aa, synthetic construct
DGPWQPMDS

SEQ ID NO: 3539 - protein, 9 aa, synthetic construct
DGCKSTKVT

SEQ ID NO: 3540 - protein, 9 aa, synthetic construct
DGREPGDAH

SEQ ID NO: 3541 - protein, 9 aa, synthetic construct
DGFVKGPSV

SEQ ID NO: 3542 - protein, 9 aa, synthetic construct
DGRRSLDIL

SEQ ID NO: 3543 - protein, 9 aa, synthetic construct
DGDIHSFSS

SEQ ID NO: 3544 - protein, 9 aa, synthetic construct
DGSQNVTKW

SEQ ID NO: 3545 - protein, 9 aa, synthetic construct
DGSGRSGMC

SEQ ID NO: 3546 - protein, 9 aa, synthetic construct
DGCHKPNSS

SEQ ID NO: 3547 - protein, 9 aa, synthetic construct
DGFLIKRSD

SEQ ID NO: 3548 - protein, 9 aa, synthetic construct
DGGASGYWC

SEQ ID NO: 3549 - protein, 9 aa, synthetic construct
DGFFSEPPG

SEQ ID NO: 3550 - protein, 9 aa, synthetic construct
DGSAYWYDV

SEQ ID NO: 3551 - protein, 9 aa, synthetic construct
DGNYSSDTC

SEQ ID NO: 3552 - protein, 9 aa, synthetic construct
DGHVSKPDP

SEQ ID NO: 3553 - protein, 9 aa, synthetic construct
DGTGLKHPL

SEQ ID NO: 3554 - protein, 9 aa, synthetic construct
DGGFMAEIE

SEQ ID NO: 3555 - protein, 9 aa, synthetic construct
DGINHQKYE

SEQ ID NO: 3556 - protein, 9 aa, synthetic construct
DGLNKMNLN

SEQ ID NO: 3557 - protein, 9 aa, synthetic construct
DGIARVPMH

SEQ ID NO: 3558 - protein, 9 aa, synthetic construct
DGAQARGLN

SEQ ID NO: 3559 - protein, 9 aa, synthetic construct
DGQLTSYRC

SEQ ID NO: 3560 - protein, 9 aa, synthetic construct
DGKSGMFKA

SEQ ID NO: 3561 - protein, 9 aa, synthetic construct
DGSEVRPRS

SEQ ID NO: 3562 - protein, 9 aa, synthetic construct
DGCTRGNNI

SEQ ID NO: 3563 - protein, 9 aa, synthetic construct
DGAQCRSMH

SEQ ID NO: 3564 - protein, 9 aa, synthetic construct
DGLLINFCV

SEQ ID NO: 3565 - protein, 9 aa, synthetic construct
DGVPGWGWR

SEQ ID NO: 3566 - protein, 9 aa, synthetic construct
DGLILKRTR

SEQ ID NO: 3567 - protein, 9 aa, synthetic construct
DGCMQSREK

SEQ ID NO: 3568 - protein, 9 aa, synthetic construct
DGHKTRVVV

SEQ ID NO: 3569 - protein, 9 aa, synthetic construct
DGRSKLAVH

SEQ ID NO: 3570 - protein, 9 aa, synthetic construct
DGGQVKMWL

SEQ ID NO: 3571 - protein, 9 aa, synthetic construct
DGRLSRVRL

SEQ ID NO: 3572 - protein, 9 aa, synthetic construct
DGTPYRNTR

SEQ ID NO: 3573 - protein, 9 aa, synthetic construct
DGTKKWCAD

SEQ ID NO: 3574 - protein, 9 aa, synthetic construct
DGNSGRFST

SEQ ID NO: 3575 - protein, 9 aa, synthetic construct
DGVQHRNST

SEQ ID NO: 3576 - protein, 9 aa, synthetic construct
DGNRILGLT

SEQ ID NO: 3577 - protein, 9 aa, synthetic construct
DGPACATNH

SEQ ID NO: 3578 - protein, 9 aa, synthetic construct
DGACSSFTL

SEQ ID NO: 3579 - protein, 9 aa, synthetic construct
DGCDALFKR

SEQ ID NO: 3580 - protein, 9 aa, synthetic construct
DGGNSPIWK

SEQ ID NO: 3581 - protein, 9 aa, synthetic construct
DGKSFATAR

SEQ ID NO: 3582 - protein, 9 aa, synthetic construct
DGGLFQRTQ

SEQ ID NO: 3583 - protein, 9 aa, synthetic construct
DGCTRSPNL

SEQ ID NO: 3584 - protein, 9 aa, synthetic construct
DGYVTSERS

SEQ ID NO: 3585 - protein, 9 aa, synthetic construct
DGRRSVGLR

SEQ ID NO: 3586 - protein, 9 aa, synthetic construct
DGVTTAKWG

SEQ ID NO: 3587 - protein, 9 aa, synthetic construct
DGVSIRKSR

SEQ ID NO: 3588 - protein, 9 aa, synthetic construct
DGNKTRSMT

SEQ ID NO: 3589 - protein, 9 aa, synthetic construct
DGIRPAQAQ

SEQ ID NO: 3590 - protein, 9 aa, synthetic construct
DGQYMSKNT

SEQ ID NO: 3591 - protein, 9 aa, synthetic construct
DGSPLDRCG

SEQ ID NO: 3592 - protein, 9 aa, synthetic construct
DGYKYDMCV

SEQ ID NO: 3593 - protein, 9 aa, synthetic construct
DGNCNMGTV

SEQ ID NO: 3594 - protein, 9 aa, synthetic construct
DGKKVRMNA

SEQ ID NO: 3595 - protein, 9 aa, synthetic construct
DGRKMRHIM

SEQ ID NO: 3596 - protein, 9 aa, synthetic construct
DGRSPCVVM

SEQ ID NO: 3597 - protein, 9 aa, synthetic construct
DGEFALDRS

SEQ ID NO: 3598 - protein, 9 aa, synthetic construct
DGGRALGRF

SEQ ID NO: 3599 - protein, 9 aa, synthetic construct
DGGKIKNKS

SEQ ID NO: 3600 - protein, 9 aa, synthetic construct
DGRSTIRPS

SEQ ID NO: 3601 - protein, 9 aa, synthetic construct
DGVRLVNKG

SEQ ID NO: 3602 - protein, 9 aa, synthetic construct
DGVRLTLSG

SEQ ID NO: 3603 - protein, 9 aa, synthetic construct
DGSKRDSTL

SEQ ID NO: 3604 - protein, 9 aa, synthetic construct
DGAVLDGAI

SEQ ID NO: 3605 - protein, 9 aa, synthetic construct
DGEGYDYVD

SEQ ID NO: 3606 - protein, 9 aa, synthetic construct
DGQCKSLFQ

SEQ ID NO: 3607 - protein, 9 aa, synthetic construct
DGVNRERTS

SEQ ID NO: 3608 - protein, 9 aa, synthetic construct
DGSILKHHN

SEQ ID NO: 3609 - protein, 9 aa, synthetic construct
DGMGRQTTP

SEQ ID NO: 3610 - protein, 9 aa, synthetic construct
DGRALGTNK

SEQ ID NO: 3611 - protein, 9 aa, synthetic construct
DGRSGGDGR

SEQ ID NO: 3612 - protein, 9 aa, synthetic construct
DGYHKTGII

SEQ ID NO: 3613 - protein, 9 aa, synthetic construct
DGYESRKSG

SEQ ID NO: 3614 - protein, 9 aa, synthetic construct
DGKVALPTF

SEQ ID NO: 3615 - protein, 9 aa, synthetic construct
DGRKVPSHV

SEQ ID NO: 3616 - protein, 9 aa, synthetic construct
DGYARVNNG

SEQ ID NO: 3617 - protein, 9 aa, synthetic construct
DGAWSDPNE

SEQ ID NO: 3618 - protein, 9 aa, synthetic construct
DGVKHLHRE

SEQ ID NO: 3619 - protein, 9 aa, synthetic construct
DGRNSRVPA

SEQ ID NO: 3620 - protein, 9 aa, synthetic construct
DGKSMTVRS

SEQ ID NO: 3621 - protein, 9 aa, synthetic construct
DGVPTSVWE

SEQ ID NO: 3622 - protein, 9 aa, synthetic construct
DGMKKNLST

SEQ ID NO: 3623 - protein, 9 aa, synthetic construct
DGAKPGFKY

SEQ ID NO: 3624 - protein, 9 aa, synthetic construct
DGGREMKYI

SEQ ID NO: 3625 - protein, 9 aa, synthetic construct
DGSVRASPF

SEQ ID NO: 3626 - protein, 9 aa, synthetic construct
DGKWSHGSN

SEQ ID NO: 3627 - protein, 9 aa, synthetic construct
DGKGRLFTQ

SEQ ID NO: 3628 - protein, 9 aa, synthetic construct
DGKLNFANK

SEQ ID NO: 3629 - protein, 9 aa, synthetic construct
DGLNSLMRG

SEQ ID NO: 3630 - protein, 9 aa, synthetic construct
DGFANKVNR

SEQ ID NO: 3631 - protein, 9 aa, synthetic construct
DGQKTRMTT

SEQ ID NO: 3632 - protein, 9 aa, synthetic construct
DGRSLTASK

SEQ ID NO: 3633 - protein, 9 aa, synthetic construct
DGSRFNITN

SEQ ID NO: 3634 - protein, 9 aa, synthetic construct
DGCGYTKCD

SEQ ID NO: 3635 - protein, 9 aa, synthetic construct
DGRMRTDLY

SEQ ID NO: 3636 - protein, 9 aa, synthetic construct
DGSSSYGCF

SEQ ID NO: 3637 - protein, 9 aa, synthetic construct
DGPTNIAKK

SEQ ID NO: 3638 - protein, 9 aa, synthetic construct
DGRVQKIQA

SEQ ID NO: 3639 - protein, 9 aa, synthetic construct
DGDRRDSIR

SEQ ID NO: 3640 - protein, 9 aa, synthetic construct
DGHRVERFN

SEQ ID NO: 3641 - protein, 9 aa, synthetic construct
DGMRSSSAL

SEQ ID NO: 3642 - protein, 9 aa, synthetic construct
DGSLVSFKT

SEQ ID NO: 3643 - protein, 9 aa, synthetic construct
DGKLMLLPK

SEQ ID NO: 3644 - protein, 9 aa, synthetic construct
DGNLTMSRQ

SEQ ID NO: 3645 - protein, 9 aa, synthetic construct
DGSWGARMG

SEQ ID NO: 3646 - protein, 9 aa, synthetic construct
DGPKKMNEP

SEQ ID NO: 3647 - protein, 9 aa, synthetic construct
DGVFNHLKS

SEQ ID NO: 3648 - protein, 9 aa, synthetic construct
DGLQPVRAR

SEQ ID NO: 3649 - protein, 9 aa, synthetic construct
DGLNRRQES

SEQ ID NO: 3650 - protein, 9 aa, synthetic construct
DGTVSFGRS

SEQ ID NO: 3651 - protein, 9 aa, synthetic construct
DGIRLVPEV

SEQ ID NO: 3652 - protein, 9 aa, synthetic construct
DGFDRSEYR

SEQ ID NO: 3653 - protein, 9 aa, synthetic construct
DGKFGAGKL

SEQ ID NO: 3654 - protein, 9 aa, synthetic construct
DGSPYARQS

SEQ ID NO: 3655 - protein, 9 aa, synthetic construct
DGGVFTTRA

SEQ ID NO: 3656 - protein, 9 aa, synthetic construct
DGTSKAVQK

SEQ ID NO: 3657 - protein, 9 aa, synthetic construct
DGSLYKADS

SEQ ID NO: 3658 - protein, 9 aa, synthetic construct
DGVKNRGLA

SEQ ID NO: 3659 - protein, 9 aa, synthetic construct
DGPIMMQCE

SEQ ID NO: 3660 - protein, 9 aa, synthetic construct
DGFSSVMTR

SEQ ID NO: 3661 - protein, 9 aa, synthetic construct
DGIMKAQAQ

SEQ ID NO: 3662 - protein, 9 aa, synthetic construct
DGSNSPYSK

SEQ ID NO: 3663 - protein, 9 aa, synthetic construct
DGMGRRQNE

SEQ ID NO: 3664 - protein, 9 aa, synthetic construct
DGNWERSQQ

SEQ ID NO: 3665 - protein, 9 aa, synthetic construct
DGLKGVTSS

SEQ ID NO: 3666 - protein, 9 aa, synthetic construct
DGRNVTIMK

SEQ ID NO: 3667 - protein, 9 aa, synthetic construct
DGEVRYRAD

SEQ ID NO: 3668 - protein, 9 aa, synthetic construct
DGNKLQMSG

SEQ ID NO: 3669 - protein, 9 aa, synthetic construct
DGQSPIGLV

SEQ ID NO: 3670 - protein, 9 aa, synthetic construct
DGTHKSAWG

SEQ ID NO: 3671 - protein, 9 aa, synthetic construct
AQSVTPKNQ

SEQ ID NO: 3672 - protein, 9 aa, synthetic construct
AQRRMKPLD

SEQ ID NO: 3673 - protein, 9 aa, synthetic construct
AQLVAGRDL

SEQ ID NO: 3674 - protein, 9 aa, synthetic construct
AQRAHVGNG

SEQ ID NO: 3675 - protein, 9 aa, synthetic construct
AQMKASSTA

SEQ ID NO: 3676 - protein, 9 aa, synthetic construct
DGRSPNLSN

SEQ ID NO: 3677 - protein, 9 aa, synthetic construct
AQGKYTAWE

SEQ ID NO: 3678 - protein, 9 aa, synthetic construct
DGTEWHVGL

SEQ ID NO: 3679 - protein, 9 aa, synthetic construct
AQQSPIQSL

SEQ ID NO: 3680 - protein, 9 aa, synthetic construct
AQSVIGMSG

SEQ ID NO: 3681 - protein, 9 aa, synthetic construct
AQTRVNYQK

SEQ ID NO: 3682 - protein, 9 aa, synthetic construct
AQEHTSELQ

SEQ ID NO: 3683 - protein, 9 aa, synthetic construct
DGRLGAVNL

SEQ ID NO: 3684 - protein, 9 aa, synthetic construct
DGLIYEYEH

SEQ ID NO: 3685 - protein, 9 aa, synthetic construct
DGFIYDYKH

SEQ ID NO: 3686 - protein, 9 aa, synthetic construct
DGQSVVKLG

SEQ ID NO: 3687 - protein, 9 aa, synthetic construct
DGGAPKCAM

SEQ ID NO: 3688 - protein, 9 aa, synthetic construct
AQRVRNGGY

SEQ ID NO: 3689 - protein, 9 aa, synthetic construct
DGDEYFERP

SEQ ID NO: 3690 - protein, 9 aa, synthetic construct
AQTVLHMGE

SEQ ID NO: 3691 - protein, 9 aa, synthetic construct
AQGRYTSLE

SEQ ID NO: 3692 - protein, 9 aa, synthetic construct
DGDEYLVRP

SEQ ID NO: 3693 - protein, 9 aa, synthetic construct
DGDFYLLKP

SEQ ID NO: 3694 - protein, 9 aa, synthetic construct
AQGKYRASD

SEQ ID NO: 3695 - protein, 9 aa, synthetic construct
AQAMVQMLG

SEQ ID NO: 3696 - protein, 9 aa, synthetic construct
AQAVYAAMD

SEQ ID NO: 3697 - protein, 9 aa, synthetic construct
AQTVQIQTY

SEQ ID NO: 3698 - protein, 9 aa, synthetic construct
AQAMVGMGV

SEQ ID NO: 3699 - protein, 9 aa, synthetic construct
DGDNYILKG

SEQ ID NO: 3700 - protein, 9 aa, synthetic construct
AQAPIKLGE

SEQ ID NO: 3701 - protein, 9 aa, synthetic construct
AQSIFRNGE

SEQ ID NO: 3702 - protein, 9 aa, synthetic construct
AQSPVQMSA

SEQ ID NO: 3703 - protein, 9 aa, synthetic construct
DGDNYMITE

SEQ ID NO: 3704 - protein, 9 aa, synthetic construct
AQGKYSYRD

SEQ ID NO: 3705 - protein, 9 aa, synthetic construct
DGQDPVRKT

SEQ ID NO: 3706 - protein, 9 aa, synthetic construct
DGDNYFLKV

SEQ ID NO: 3707 - protein, 9 aa, synthetic construct
DGDNYHVPP

SEQ ID NO: 3708 - protein, 9 aa, synthetic construct
AQSVVALGS

SEQ ID NO: 3709 - protein, 9 aa, synthetic construct
AQMQSPIAV

SEQ ID NO: 3710 - protein, 9 aa, synthetic construct
DGVVGHVKG

SEQ ID NO: 3711 - protein, 9 aa, synthetic construct
AQQNPVATV

SEQ ID NO: 3712 - protein, 9 aa, synthetic construct
DGDQYTQEP

SEQ ID NO: 3713 - protein, 9 aa, synthetic construct
AQGKYTHND

SEQ ID NO: 3714 - protein, 9 aa, synthetic construct
AQSIVRLGD

SEQ ID NO: 3715 - protein, 9 aa, synthetic construct
AQTEWHVGL

SEQ ID NO: 3716 - protein, 9 aa, synthetic construct
AQTVVQYGE

SEQ ID NO: 3717 - protein, 9 aa, synthetic construct
DGQQRPSLT

SEQ ID NO: 3718 - protein, 9 aa, synthetic construct
AQGPIRDGA

SEQ ID NO: 3719 - protein, 9 aa, synthetic construct
DGDKYFLKP

SEQ ID NO: 3720 - protein, 9 aa, synthetic construct
DGDNYSHLP

SEQ ID NO: 3721 - protein, 9 aa, synthetic construct
DGDNYKYVG

SEQ ID NO: 3722 - protein, 9 aa, synthetic construct
AQGMIGMGS

SEQ ID NO: 3723 - protein, 9 aa, synthetic construct
DGLLGMYKP

SEQ ID NO: 3724 - protein, 9 aa, synthetic construct
AQAVVRTDG

SEQ ID NO: 3725 - protein, 9 aa, synthetic construct
AQMMVGLGQ

SEQ ID NO: 3726 - protein, 9 aa, synthetic construct
AQHVMNQIS

SEQ ID NO: 3727 - protein, 9 aa, synthetic construct
DGDNYLLKT

SEQ ID NO: 3728 - protein, 9 aa, synthetic construct
AQGRETYMD

SEQ ID NO: 3729 - protein, 9 aa, synthetic construct
DGMYPYIGS

SEQ ID NO: 3730 - protein, 9 aa, synthetic construct
DGDFRTIVQ

SEQ ID NO: 3731 - protein, 9 aa, synthetic construct
DGDDYFVKE

SEQ ID NO: 3732 - protein, 9 aa, synthetic construct
AQCVSLCSA

SEQ ID NO: 3733 - protein, 9 aa, synthetic construct
DGDNYFIKL

SEQ ID NO: 3734 - protein, 9 aa, synthetic construct
DGDEYLTAP

SEQ ID NO: 3735 - protein, 9 aa, synthetic construct
AQSPVGIGT

SEQ ID NO: 3736 - protein, 9 aa, synthetic construct
DGDYYFNKP

SEQ ID NO: 3737 - protein, 9 aa, synthetic construct
DGDEYIIRE

SEQ ID NO: 3738 - protein, 9 aa, synthetic construct
DGLNGMFKG

SEQ ID NO: 3739 - protein, 9 aa, synthetic construct
DGTQSITSW

SEQ ID NO: 3740 - protein, 9 aa, synthetic construct
DGGRYTSLE

SEQ ID NO: 3741 - protein, 9 aa, synthetic construct
DGDNYQVRS

SEQ ID NO: 3742 - protein, 9 aa, synthetic construct
DGFRFQDRD

SEQ ID NO: 3743 - protein, 9 aa, synthetic construct
AQHFPRMVD

SEQ ID NO: 3744 - protein, 9 aa, synthetic construct
DGNQHISSW

SEQ ID NO: 3745 - protein, 9 aa, synthetic construct
AQARYTALD

SEQ ID NO: 3746 - protein, 9 aa, synthetic construct
AQPAHGVDR

SEQ ID NO: 3747 - protein, 9 aa, synthetic construct
AQTIYEQRS

SEQ ID NO: 3748 - protein, 9 aa, synthetic construct
AQSTTAQYN

SEQ ID NO: 3749 - protein, 9 aa, synthetic construct
AQGRYTSWA

SEQ ID NO: 3750 - protein, 9 aa, synthetic construct
DGIYTAWSR

SEQ ID NO: 3751 - protein, 9 aa, synthetic construct
AQNVVAMGY

SEQ ID NO: 3752 - protein, 9 aa, synthetic construct
DGCVATPRH

SEQ ID NO: 3753 - protein, 9 aa, synthetic construct
AQTMSQWGE

SEQ ID NO: 3754 - protein, 9 aa, synthetic construct
DGDNRLHYP

SEQ ID NO: 3755 - protein, 9 aa, synthetic construct
DGILYGRLT

SEQ ID NO: 3756 - protein, 9 aa, synthetic construct
AQSVMLQLN

SEQ ID NO: 3757 - protein, 9 aa, synthetic construct
AQHLLRQVD

SEQ ID NO: 3758 - protein, 9 aa, synthetic construct
AQGFVRMDT

SEQ ID NO: 3759 - protein, 9 aa, synthetic construct
AQCVVMDRC

SEQ ID NO: 3760 - protein, 9 aa, synthetic construct
DGDKYFYKE

SEQ ID NO: 3761 - protein, 9 aa, synthetic construct
AQGVIRFDS

SEQ ID NO: 3762 - protein, 9 aa, synthetic construct
DGVWLNIET

SEQ ID NO: 3763 - protein, 9 aa, synthetic construct
AQQSPVKFS

SEQ ID NO: 3764 - protein, 9 aa, synthetic construct
DGFIVSHNV

SEQ ID NO: 3765 - protein, 9 aa, synthetic construct
DGYQSPFMN

SEQ ID NO: 3766 - protein, 9 aa, synthetic construct
DGERGITKA

SEQ ID NO: 3767 - protein, 9 aa, synthetic construct
AQSNYTALG

SEQ ID NO: 3768 - protein, 9 aa, synthetic construct
DGDYRTVKQ

SEQ ID NO: 3769 - protein, 9 aa, synthetic construct
AQGSGLQMF

SEQ ID NO: 3770 - protein, 9 aa, synthetic construct
AQGMVGLGF

SEQ ID NO: 3771 - protein, 9 aa, synthetic construct
DGDYRVTKQ

SEQ ID NO: 3772 - protein, 9 aa, synthetic construct
AQTEYWNER

SEQ ID NO: 3773 - protein, 9 aa, synthetic construct
AQSPVKLGY

SEQ ID NO: 3774 - protein, 9 aa, synthetic construct
DGDYYVQKG

SEQ ID NO: 3775 - protein, 9 aa, synthetic construct
DGKVGQTKT

SEQ ID NO: 3776 - protein, 9 aa, synthetic construct
DGIRGQEKA

SEQ ID NO: 3777 - protein, 9 aa, synthetic construct
AQQPTKLGS

SEQ ID NO: 3778 - protein, 9 aa, synthetic construct
DGDMYLEVA

SEQ ID NO: 3779 - protein, 9 aa, synthetic construct
AQDMLRLGM

SEQ ID NO: 3780 - protein, 9 aa, synthetic construct
AQGVVAYLT

SEQ ID NO: 3781 - protein, 9 aa, synthetic construct
AQNVYSPVL

SEQ ID NO: 3782 - protein, 9 aa, synthetic construct
AQEKPGQVK

SEQ ID NO: 3783 - protein, 9 aa, synthetic construct
AQTIVWQID

SEQ ID NO: 3784 - protein, 9 aa, synthetic construct
AQINGMSKG

SEQ ID NO: 3785 - protein, 9 aa, synthetic construct
DGMNYFGDL

SEQ ID NO: 3786 - protein, 9 aa, synthetic construct
AQCDWSHMD

SEQ ID NO: 3787 - protein, 9 aa, synthetic construct
AQTTGYQYS

SEQ ID NO: 3788 - protein, 9 aa, synthetic construct
AQTPVKLSH

SEQ ID NO: 3789 - protein, 9 aa, synthetic construct
AQGKYMPRD

SEQ ID NO: 3790 - protein, 9 aa, synthetic construct
AQGMSLLSK

SEQ ID NO: 3791 - protein, 9 aa, synthetic construct
AQCMVAIGC

SEQ ID NO: 3792 - protein, 9 aa, synthetic construct
DGRAGQNKG

SEQ ID NO: 3793 - protein, 9 aa, synthetic construct
DGLRGNTYL

SEQ ID NO: 3794 - protein, 9 aa, synthetic construct
DGSQDTTTW

SEQ ID NO: 3795 - protein, 9 aa, synthetic construct
DGRTGMLKP

SEQ ID NO: 3796 - protein, 9 aa, synthetic construct
AQTPGLNKG

SEQ ID NO: 3797 - protein, 9 aa, synthetic construct
DGEGFYCAK

SEQ ID NO: 3798 - protein, 9 aa, synthetic construct
AQTPVAAGC

SEQ ID NO: 3799 - protein, 9 aa, synthetic construct
DGKSGQNKS

SEQ ID NO: 3800 - protein, 9 aa, synthetic construct
DGGETHVWK

SEQ ID NO: 3801 - protein, 9 aa, synthetic construct
AQCDSIYCL

SEQ ID NO: 3802 - protein, 9 aa, synthetic construct
AQICCKSPC

SEQ ID NO: 3803 - protein, 9 aa, synthetic construct
DGSGPIRMG

SEQ ID NO: 3804 - protein, 9 aa, synthetic construct
AQKVTGFGS

SEQ ID NO: 3805 - protein, 9 aa, synthetic construct
AQLRKANRP

SEQ ID NO: 3806 - protein, 9 aa, synthetic construct
DGKPGMLKV

SEQ ID NO: 3807 - protein, 9 aa, synthetic construct
AQVRHHSDN

SEQ ID NO: 3808 - protein, 9 aa, synthetic construct
AQTPIRMGP

SEQ ID NO: 3809 - protein, 9 aa, synthetic construct
AQSPIRVGT

SEQ ID NO: 3810 - protein, 9 aa, synthetic construct
AQQDPVRKT

SEQ ID NO: 3811 - protein, 9 aa, synthetic construct
AQTVLNQMK

SEQ ID NO: 3812 - protein, 9 aa, synthetic construct
AQSGPIRMG

SEQ ID NO: 3813 - protein, 9 aa, synthetic construct
DGDFYKCEP

SEQ ID NO: 3814 - protein, 9 aa, synthetic construct
DGLKLISKG

SEQ ID NO: 3815 - protein, 9 aa, synthetic construct
AQTVTFQTC

SEQ ID NO: 3816 - protein, 9 aa, synthetic construct
AQDSEYFCD

SEQ ID NO: 3817 - protein, 9 aa, synthetic construct
AQRARDRHI

SEQ ID NO: 3818 - protein, 9 aa, synthetic construct
AQQCKVSVL

SEQ ID NO: 3819 - protein, 9 aa, synthetic construct
AQSWTYRRF

SEQ ID NO: 3820 - protein, 9 aa, synthetic construct
AQGPVRANG

SEQ ID NO: 3821 - protein, 9 aa, synthetic construct
AQGKRCAIE

SEQ ID NO: 3822 - protein, 9 aa, synthetic construct
AQSLQLFGM

SEQ ID NO: 3823 - protein, 9 aa, synthetic construct
AQVGDVRLK

SEQ ID NO: 3824 - protein, 9 aa, synthetic construct
AQTMTKFGT

SEQ ID NO: 3825 - protein, 9 aa, synthetic construct
AQPCIRDRG

SEQ ID NO: 3826 - protein, 9 aa, synthetic construct
DGKTGHYKV

SEQ ID NO: 3827 - protein, 9 aa, synthetic construct
DGFSTFINK

SEQ ID NO: 3828 - protein, 9 aa, synthetic construct
AQILYGRLT

SEQ ID NO: 3829 - protein, 9 aa, synthetic construct
AQEYSLSFK

SEQ ID NO: 3830 - protein, 9 aa, synthetic construct
AQERIGQFK

SEQ ID NO: 3831 - protein, 9 aa, synthetic construct
AQRVKKVPG

SEQ ID NO: 3832 - protein, 9 aa, synthetic construct
DGQMVTRFG

SEQ ID NO: 3833 - protein, 9 aa, synthetic construct
AQLLAWFIL

SEQ ID NO: 3834 - protein, 9 aa, synthetic construct
AQSTYWDRC

SEQ ID NO: 3835 - protein, 9 aa, synthetic construct
AQRNAKLKM

SEQ ID NO: 3836 - protein, 9 aa, synthetic construct
AQSPYKLGS

SEQ ID NO: 3837 - protein, 9 aa, synthetic construct
AQGKDCLLP

SEQ ID NO: 3838 - protein, 9 aa, synthetic construct
AQSATCQRS

SEQ ID NO: 3839 - protein, 9 aa, synthetic construct
AQCASICNF

SEQ ID NO: 3840 - protein, 9 aa, synthetic construct
AQAIRGARA

SEQ ID NO: 3841 - protein, 9 aa, synthetic construct
AQTVYWMPA

SEQ ID NO: 3842 - protein, 9 aa, synthetic construct
AQHRNCQVD

SEQ ID NO: 3843 - protein, 9 aa, synthetic construct
AQQNPVKCS

SEQ ID NO: 3844 - protein, 9 aa, synthetic construct
DGLKLVFKP

SEQ ID NO: 3845 - protein, 9 aa, synthetic construct
DGGNCMHSC

SEQ ID NO: 3846 - protein, 9 aa, synthetic construct
AQTVIKYGA

SEQ ID NO: 3847 - protein, 9 aa, synthetic construct
DGIKLIVKS

SEQ ID NO: 3848 - protein, 9 aa, synthetic construct
AQGCRALTS

SEQ ID NO: 3849 - protein, 9 aa, synthetic construct
AQNRCSNVN

SEQ ID NO: 3850 - protein, 9 aa, synthetic construct
AQHVPGKKQ

SEQ ID NO: 3851 - protein, 9 aa, synthetic construct
AQCVAAMKC

SEQ ID NO: 3852 - protein, 9 aa, synthetic construct
AQSFIKLGQ

SEQ ID NO: 3853 - protein, 9 aa, synthetic construct
AQAGSYDCV

SEQ ID NO: 3854 - protein, 9 aa, synthetic construct
AQAMAARSS

SEQ ID NO: 3855 - protein, 9 aa, synthetic construct
AQTRWHGNE

SEQ ID NO: 3856 - protein, 9 aa, synthetic construct
AQVKRQLRC

SEQ ID NO: 3857 - protein, 9 aa, synthetic construct
AQKPIGFGA

SEQ ID NO: 3858 - protein, 9 aa, synthetic construct
AQDCRIVKQ

SEQ ID NO: 3859 - protein, 9 aa, synthetic construct
AQCVVVTRC

SEQ ID NO: 3860 - protein, 9 aa, synthetic construct
AQIIYVRND

SEQ ID NO: 3861 - protein, 9 aa, synthetic construct
DGFMLGRCP

SEQ ID NO: 3862 - protein, 9 aa, synthetic construct
DGLARLIHL

SEQ ID NO: 3863 - protein, 9 aa, synthetic construct
AQPFFSECL

SEQ ID NO: 3864 - protein, 9 aa, synthetic construct
DGKAGQIKY

SEQ ID NO: 3865 - protein, 9 aa, synthetic construct
AQSSFSKNF

SEQ ID NO: 3866 - protein, 9 aa, synthetic construct
AQGPVKMGF

SEQ ID NO: 3867 - protein, 9 aa, synthetic construct
AQSVVRMSA

SEQ ID NO: 3868 - protein, 9 aa, synthetic construct
AQGCQWMPK

SEQ ID NO: 3869 - protein, 9 aa, synthetic construct
AQRILKGMG

SEQ ID NO: 3870 - protein, 9 aa, synthetic construct
AQSPFNCGA

SEQ ID NO: 3871 - protein, 9 aa, synthetic construct
AQLWRQQVA

SEQ ID NO: 3872 - protein, 9 aa, synthetic construct
AQSVVKLGN

SEQ ID NO: 3873 - protein, 9 aa, synthetic construct
AQDKPGQVK

SEQ ID NO: 3874 - protein, 9 aa, synthetic construct
AQVPQLIKG

SEQ ID NO: 3875 - protein, 9 aa, synthetic construct
AQTISTGIY

SEQ ID NO: 3876 - protein, 9 aa, synthetic construct
DGFGFTLST

SEQ ID NO: 3877 - protein, 9 aa, synthetic construct
AQWQSPVHS

SEQ ID NO: 3878 - protein, 9 aa, synthetic construct
AQNPVARSD

SEQ ID NO: 3879 - protein, 9 aa, synthetic construct
AQKWDNQQS

SEQ ID NO: 3880 - protein, 9 aa, synthetic construct
DGIFGGGGK

SEQ ID NO: 3881 - protein, 9 aa, synthetic construct
AQTMLRMGE

SEQ ID NO: 3882 - protein, 9 aa, synthetic construct
AQSMLKLGE

SEQ ID NO: 3883 - protein, 9 aa, synthetic construct
AQISGRMAA

SEQ ID NO: 3884 - protein, 9 aa, synthetic construct
AQTVLFQVE

SEQ ID NO: 3885 - protein, 9 aa, synthetic construct
AQTKSNGIS

SEQ ID NO: 3886 - protein, 9 aa, synthetic construct
AQGRYTASE

SEQ ID NO: 3887 - protein, 9 aa, synthetic construct
DGIKGGGSK

SEQ ID NO: 3888 - protein, 9 aa, synthetic construct
AQSVLSQVS

SEQ ID NO: 3889 - protein, 9 aa, synthetic construct
AQADPLHKG

SEQ ID NO: 3890 - protein, 9 aa, synthetic construct
AQTTLSQVT

SEQ ID NO: 3891 - protein, 9 aa, synthetic construct
AQTVLRSGE

SEQ ID NO: 3892 - protein, 9 aa, synthetic construct
AQSPFKEGL

SEQ ID NO: 3893 - protein, 9 aa, synthetic construct
AQSPVGLGE

SEQ ID NO: 3894 - protein, 9 aa, synthetic construct
AQTTVHQSS

SEQ ID NO: 3895 - protein, 9 aa, synthetic construct
DGCQPPKCI

SEQ ID NO: 3896 - protein, 9 aa, synthetic construct
AQTVLHQTH

SEQ ID NO: 3897 - protein, 9 aa, synthetic construct
AQERYTSHN

SEQ ID NO: 3898 - protein, 9 aa, synthetic construct
AQHTTHQVS

SEQ ID NO: 3899 - protein, 9 aa, synthetic construct
AQTVVGMGI

SEQ ID NO: 3900 - protein, 9 aa, synthetic construct
AQSVVGLGA

SEQ ID NO: 3901 - protein, 9 aa, synthetic construct
AQTVNYQVT

SEQ ID NO: 3902 - protein, 9 aa, synthetic construct
AQQVIKGGE

SEQ ID NO: 3903 - protein, 9 aa, synthetic construct
AQTWDTGIS

SEQ ID NO: 3904 - protein, 9 aa, synthetic construct
AQPMLDRNT

SEQ ID NO: 3905 - protein, 9 aa, synthetic construct
DGMGPIRMS

SEQ ID NO: 3906 - protein, 9 aa, synthetic construct
AQTVLFQQS

SEQ ID NO: 3907 - protein, 9 aa, synthetic construct
AQTVNFQIT

SEQ ID NO: 3908 - protein, 9 aa, synthetic construct
AQTTLQQIT

SEQ ID NO: 3909 - protein, 9 aa, synthetic construct
DGIAEEDWM

SEQ ID NO: 3910 - protein, 9 aa, synthetic construct
AQNQSPVGF

SEQ ID NO: 3911 - protein, 9 aa, synthetic construct
AQSTVMQIS

SEQ ID NO: 3912 - protein, 9 aa, synthetic construct
AQSITGLGY

SEQ ID NO: 3913 - protein, 9 aa, synthetic construct
AQVIGHNLV

SEQ ID NO: 3914 - protein, 9 aa, synthetic construct
DGDNRVTRE

SEQ ID NO: 3915 - protein, 9 aa, synthetic construct
DGQSPIMRM

SEQ ID NO: 3916 - protein, 9 aa, synthetic construct
DGTQSPTSW

SEQ ID NO: 3917 - protein, 9 aa, synthetic construct
DGVWLNLSS

SEQ ID NO: 3918 - protein, 9 aa, synthetic construct
AQAKPMFKC

SEQ ID NO: 3919 - protein, 9 aa, synthetic construct
AQGFQLPHL

SEQ ID NO: 3920 - protein, 9 aa, synthetic construct
AQIVTNQYG

SEQ ID NO: 3921 - protein, 9 aa, synthetic construct
AQGVIRMGD

SEQ ID NO: 3922 - protein, 9 aa, synthetic construct
DGAWTGAPK

SEQ ID NO: 3923 - protein, 9 aa, synthetic construct
AQHTLSQMS

SEQ ID NO: 3924 - protein, 9 aa, synthetic construct
AQGKYAAIC

SEQ ID NO: 3925 - protein, 9 aa, synthetic construct
AQENDMVFF

SEQ ID NO: 3926 - protein, 9 aa, synthetic construct
DGWYEPGSS

SEQ ID NO: 3927 - protein, 9 aa, synthetic construct
AQLSAFTSA

SEQ ID NO: 3928 - protein, 9 aa, synthetic construct
DGKDGHNKG

SEQ ID NO: 3929 - protein, 9 aa, synthetic construct
DGKYEPPAC

SEQ ID NO: 3930 - protein, 9 aa, synthetic construct
DGRSFNDMD

SEQ ID NO: 3931 - protein, 9 aa, synthetic construct
DGEDRFGRD

SEQ ID NO: 3932 - protein, 9 aa, synthetic construct
DGLTYYGIE

SEQ ID NO: 3933 - protein, 9 aa, synthetic construct
DGGNYVVYK

SEQ ID NO: 3934 - protein, 9 aa, synthetic construct
DGIVRPTYG

SEQ ID NO: 3935 - protein, 9 aa, synthetic construct
AQFIASHNV

SEQ ID NO: 3936 - protein, 9 aa, synthetic construct
AQPSSISYL

SEQ ID NO: 3937 - protein, 9 aa, synthetic construct
AQGSGLNIM

SEQ ID NO: 3938 - protein, 9 aa, synthetic construct
DGDTYALGY

SEQ ID NO: 3939 - protein, 9 aa, synthetic construct
DGKDGHWKP

SEQ ID NO: 3940 - protein, 9 aa, synthetic construct
AQTMVKGGP

SEQ ID NO: 3941 - protein, 9 aa, synthetic construct
AQVVYDREF

SEQ ID NO: 3942 - protein, 9 aa, synthetic construct
AQTRFIEPY

SEQ ID NO: 3943 - protein, 9 aa, synthetic construct
AQPLVTHNI

SEQ ID NO: 3944 - protein, 9 aa, synthetic construct
AQSTTYQFS

SEQ ID NO: 3945 - protein, 9 aa, synthetic construct
AQKPTKLGE

SEQ ID NO: 3946 - protein, 9 aa, synthetic construct
AQHGSYALA

SEQ ID NO: 3947 - protein, 9 aa, synthetic construct
AQNPTKMGM

SEQ ID NO: 3948 - protein, 9 aa, synthetic construct
AQMVYDRDF

SEQ ID NO: 3949 - protein, 9 aa, synthetic construct
AQGNSLSYQ

SEQ ID NO: 3950 - protein, 9 aa, synthetic construct
AQNPVRNGA

SEQ ID NO: 3951 - protein, 9 aa, synthetic construct
AQSMVKGGS

SEQ ID NO: 3952 - protein, 9 aa, synthetic construct
AQSMVKGGP

SEQ ID NO: 3953 - protein, 9 aa, synthetic construct
AQVYGLMEN

SEQ ID NO: 3954 - protein, 9 aa, synthetic construct
AQHTKFAYD

SEQ ID NO: 3955 - protein, 9 aa, synthetic construct
AQSVHYQVS

SEQ ID NO: 3956 - protein, 9 aa, synthetic construct
AQTVVKMGV

SEQ ID NO: 3957 - protein, 9 aa, synthetic construct
AQDGSLTFR

SEQ ID NO: 3958 - protein, 9 aa, synthetic construct
AQSIHSHNT

SEQ ID NO: 3959 - protein, 9 aa, synthetic construct
AQILRIEPT

SEQ ID NO: 3960 - protein, 9 aa, synthetic construct
DGGMSPVWK

SEQ ID NO: 3961 - protein, 9 aa, synthetic construct
AQSYTHPDN

SEQ ID NO: 3962 - protein, 9 aa, synthetic construct
AQTVRNQVS

SEQ ID NO: 3963 - protein, 9 aa, synthetic construct
AQSVVRDKG

SEQ ID NO: 3964 - protein, 9 aa, synthetic construct
AQNVLQMGK

SEQ ID NO: 3965 - protein, 9 aa, synthetic construct
DGILGLFKG

SEQ ID NO: 3966 - protein, 9 aa, synthetic construct
DGRLECCNF

SEQ ID NO: 3967 - protein, 9 aa, synthetic construct
AQQFASHNV

SEQ ID NO: 3968 - protein, 9 aa, synthetic construct
AQMDGLWKG

SEQ ID NO: 3969 - protein, 9 aa, synthetic construct
DGRIGHSKP

SEQ ID NO: 3970 - protein, 9 aa, synthetic construct
AQGRHSACE

SEQ ID NO: 3971 - protein, 9 aa, synthetic construct
AQYRNGGAS

SEQ ID NO: 3972 - protein, 9 aa, synthetic construct
AQTVVKLGS

SEQ ID NO: 3973 - protein, 9 aa, synthetic construct
AQSTTWQTS

SEQ ID NO: 3974 - protein, 9 aa, synthetic construct
AQSVVKLGT

SEQ ID NO: 3975 - protein, 9 aa, synthetic construct
AQQNSLSYK

SEQ ID NO: 3976 - protein, 9 aa, synthetic construct
DGMRSGALN

SEQ ID NO: 3977 - protein, 9 aa, synthetic construct
AQTRMSGIS

SEQ ID NO: 3978 - protein, 9 aa, synthetic construct
AQGSSLPFK

SEQ ID NO: 3979 - protein, 9 aa, synthetic construct
DGDLKWNEP

SEQ ID NO: 3980 - protein, 9 aa, synthetic construct
AQSMVGMGC

SEQ ID NO: 3981 - protein, 9 aa, synthetic construct
DGAITNVWK

SEQ ID NO: 3982 - protein, 9 aa, synthetic construct
AQKWDLTDR

SEQ ID NO: 3983 - protein, 9 aa, synthetic construct
AQGMIKGGS

SEQ ID NO: 3984 - protein, 9 aa, synthetic construct
AQGNSLKYT

SEQ ID NO: 3985 - protein, 9 aa, synthetic construct
DGGHFVVFK

SEQ ID NO: 3986 - protein, 9 aa, synthetic construct
DGKVGLIKH

SEQ ID NO: 3987 - protein, 9 aa, synthetic construct
AQNVIKLGM

SEQ ID NO: 3988 - protein, 9 aa, synthetic construct
AQALLYAHQ

SEQ ID NO: 3989 - protein, 9 aa, synthetic construct
AQHNSLSFK

SEQ ID NO: 3990 - protein, 9 aa, synthetic construct
AQIMSCTMF

SEQ ID NO: 3991 - protein, 9 aa, synthetic construct
AQDSVYVNR

SEQ ID NO: 3992 - protein, 9 aa, synthetic construct
AQTLQYQKS

SEQ ID NO: 3993 - protein, 9 aa, synthetic construct
AQLNRLPHL

SEQ ID NO: 3994 - protein, 9 aa, synthetic construct
AQTTLSQRT

SEQ ID NO: 3995 - protein, 9 aa, synthetic construct
DGAWTGSRI

SEQ ID NO: 3996 - protein, 9 aa, synthetic construct
AQTWTTGVS

SEQ ID NO: 3997 - protein, 9 aa, synthetic construct
AQNLSLAYK

SEQ ID NO: 3998 - protein, 9 aa, synthetic construct
AQQMCESTK

SEQ ID NO: 3999 - protein, 9 aa, synthetic construct
AQQNSLSFK

SEQ ID NO: 4000 - protein, 9 aa, synthetic construct
AQKWDVMDR

SEQ ID NO: 4001 - protein, 9 aa, synthetic construct
AQYPPVFKS

SEQ ID NO: 4002 - protein, 9 aa, synthetic construct
DGKSPHYKP

SEQ ID NO: 4003 - protein, 9 aa, synthetic construct
AQSVVRLGV

SEQ ID NO: 4004 - protein, 9 aa, synthetic construct
AQLNDIRRH

SEQ ID NO: 4005 - protein, 9 aa, synthetic construct
AQGVVRMAQ

SEQ ID NO: 4006 - protein, 9 aa, synthetic construct
AQFSGLAYK

SEQ ID NO: 4007 - protein, 9 aa, synthetic construct
AQRWEIKPE

SEQ ID NO: 4008 - protein, 9 aa, synthetic construct
AQIIGGRAV

SEQ ID NO: 4009 - protein, 9 aa, synthetic construct
AQYLHGREF

SEQ ID NO: 4010 - protein, 9 aa, synthetic construct
AQGKYQTSG

SEQ ID NO: 4011 - protein, 9 aa, synthetic construct
AQKISSHNI

SEQ ID NO: 4012 - protein, 9 aa, synthetic construct
DGTASSKWG

SEQ ID NO: 4013 - protein, 9 aa, synthetic construct
AQVGEVRLK

SEQ ID NO: 4014 - protein, 9 aa, synthetic construct
AQKLSSHNT

SEQ ID NO: 4015 - protein, 9 aa, synthetic construct
AQLSSLSFK

SEQ ID NO: 4016 - protein, 9 aa, synthetic construct
DGGPVAIFW

SEQ ID NO: 4017 - protein, 9 aa, synthetic construct
AQTRWTGIS

SEQ ID NO: 4018 - protein, 9 aa, synthetic construct
AQWSGSHNY

SEQ ID NO: 4019 - protein, 9 aa, synthetic construct
AQGNSMSYK

SEQ ID NO: 4020 - protein, 9 aa, synthetic construct
AQGSSMMYK

SEQ ID NO: 4021 - protein, 9 aa, synthetic construct
DGRTCSFTN

SEQ ID NO: 4022 - protein, 9 aa, synthetic construct
DGKGVMLYK

SEQ ID NO: 4023 - protein, 9 aa, synthetic construct
AQLHMGRLS

SEQ ID NO: 4024 - protein, 9 aa, synthetic construct
AQKHNTGIS

SEQ ID NO: 4025 - protein, 9 aa, synthetic construct
AQCINGRSL

SEQ ID NO: 4026 - protein, 9 aa, synthetic construct
AQYPAISFK

SEQ ID NO: 4027 - protein, 9 aa, synthetic construct
AQISPGRYL

SEQ ID NO: 4028 - protein, 9 aa, synthetic construct
AQTSSMRHL

SEQ ID NO: 4029 - protein, 9 aa, synthetic construct
AQRVVSHNI

SEQ ID NO: 4030 - protein, 9 aa, synthetic construct
AQGRGLSIL

SEQ ID NO: 4031 - protein, 9 aa, synthetic construct
AQTMSRGGC

SEQ ID NO: 4032 - protein, 9 aa, synthetic construct
AQPNPVRYC

SEQ ID NO: 4033 - protein, 9 aa, synthetic construct
AQLTNRSSP

SEQ ID NO: 4034 - protein, 9 aa, synthetic construct
AQALSHTNN

SEQ ID NO: 4035 - protein, 9 aa, synthetic construct
AQIKSRQAH

SEQ ID NO: 4036 - protein, 9 aa, synthetic construct
AQNNNPCAS